(19) United States
(12) Patent Application Publication
(10) Pub. No.: US 2024/0132855 A1
(43) Pub. Date: Apr. 25, 2024

(54) COMPOSITIONS AND METHODS FOR EPIGENETIC REGULATION OF HBV GENE EXPRESSION

(71) Applicant: Chroma Medicine, Inc., Boston, MA (US)

(72) Inventors: Aron Brandon Jaffe, Brookline, MA (US); Noorussahar Abubucker, Watertown, MA (US); Yesseinia Anglero-Rodriguez, Everett, MA (US); Vic Myer, Arlington, MA (US); Angelo Leone Lombardo, Rome (IT); Martino Alfredo Cappelluti, Milan (IT)

(21) Appl. No.: 18/473,990

(22) Filed: Sep. 25, 2023

Related U.S. Application Data
(60) Provisional application No. 63/581,229, filed on Sep. 7, 2023.
(60) Provisional application No. 63/516,063, filed on Jul. 27, 2023.
(60) Provisional application No. 63/502,328, filed on May 15, 2023.
(60) Provisional application No. 63/409,607, filed on Sep. 23, 2022.

(51) Int. Cl. C12N 7/00; C07K 14/47; C12N 9/10; C12N 9/22; C12N 15/11

(52) U.S. Cl. CPC C12N 7/00; C07K 14/4703; C12N 9/1007; C12N 9/22; C12N 15/11; C07K 2319/09; C12N 2310/20; C12N 2710/00021; C12Y 201/01037

(57) ABSTRACT

This invention relates to compositions, methods, strategies, and treatment modalities related to the epigenetic modification of hepatitis B virus (HBV) genes.

### CROSS-REFERENCE

[0001] This application claims the benefit of U.S. Provisional Application No. 63/409,607, filed Sep. 23, 2022, U.S. Provisional Application No. 63/502,328, filed May 15, 2023, U.S. Provisional Application No. 63/516,063, filed Jul. 27, 2023, and U.S. Provisional Application No. 63/581,229, filed Sep. 7, 2023, each of which is incorporated herein by reference in its entirety.

### SEQUENCE LISTING

[0002] This application contains a Sequence Listing which has been submitted electronically in XML format and is hereby incorporated by reference is its entirety. Said XML copy, created on Dec. 4, 2023, is named 59073-720_201_SL.xml and is 1,372,818 bytes in size.

### BACKGROUND OF THE INVENTION

[0003] Despite available treatments, chronic hepatitis B (CHB) remains a high unmet medical need, with more than 250 million carriers of hepatitis B virus (HBV) worldwide and approximately 800,000 annual deaths due to HBV-related liver disease. Current approved CHB therapies elicit a functional cure rate (defined as durable HBsAg loss and undetectable serum HBV after completing a course of treatment) of less than 20%. Accordingly, there is a need for improved clinical modalities targeting HBV.

### SUMMARY OF THE INVENTION

[0004] Some aspects of the present disclosure provide systems, compositions, strategies, and methods for the epigenetic modification of HBV, including HBV in host cells and organisms.

[0005] Some aspects of this disclosure provide methods of modifying an epigenetic state of a hepatitis B virus (HBV) gene or genome, comprising contacting the HBV gene or genome with an epigenetic editing system, wherein the epigenetic editing system comprises a first DNA binding domain, a first DNMT domain, and a transcriptional repressor domain or one or more nucleic acid molecules encoding thereof, wherein the first DNA binding domain binds a first target region of the HBV gene or genome, and wherein the contacting results in a reduction of: number of HBV viral episomes, replication of the HBV gene or genome, and/or expression of a protein product encoded by the HBV gene or genome, wherein said reduction is at least about 20% compared to contacting the HBV gene or genome with a suitable control, and/or wherein said reduction of the number of HBV viral episomes, of replication of the HBV gene or genome, or of expression of a protein product encoded by the HBV gene or genome is at least about 20% compared to the number, replication, and/or expression in the subject before administering. Some aspects of this disclosure provide methods of treating an HBV infection in a subject comprising administering an epigenetic editing system to the subject, wherein the epigenetic editing system comprises a first DNA binding domain, a first DNMT domain, and a transcriptional repressor domain or one or more nucleic acid molecules encoding thereof, wherein the first DNA binding domain binds a first target region of a HBV gene or genome, and wherein the contacting results in a reduction of: number of HBV viral episomes, replication of the HBV gene or genome, and/or expression of a protein product encoded by the HBV gene or genome, wherein said reduction is at least about 20% compared to administering a suitable control, and/or wherein said reduction of the number of HBV viral episomes, of replication of the HBV gene or genome, or of expression of a protein product encoded by the HBV gene or genome is at least about 20% compared to the number, replication, and/or expression in the subject before administering. Some aspects of this disclosure provide methods of modulating expression of an HBV gene or genome comprising contacting the HBV gene or genome with an epigenetic editing system, wherein the epigenetic editing system comprises a first DNA binding domain, a first DNMT domain, and a transcriptional repressor domain or one or more nucleic acid molecules encoding thereof, wherein the first DNA binding domain binds a first target region of the HBV gene or genome, and wherein the contacting results in a reduction of expression of a gene product encoded by the HBV gene or genome, optionally, wherein the gene product is a nucleic acid or a protein, wherein said reduction is at least about 20% compared to contacting the HBV genome with a suitable control, and/or wherein said reduction of gene product encoded by the HBV gene or genome is at least about 20% compared to the expression in the subject before administering. Some aspects of this disclosure provide methods of inhibiting viral replication in a cell infected with an HBV comprising administering an epigenetic editing system, wherein the epigenetic editing system comprises a first DNA binding domain, a first DNMT domain, and a transcriptional repressor domain or one or more nucleic acid molecules encoding thereof, wherein the first DNA binding domain binds a first target region of a HBV gene or genome, and wherein the epigenetic editing system targets a target region of the HBV gene or genome, and wherein the contacting results in a reduction of number of HBV viral episomes or replication of the HBV gene or genome, wherein said reduction is at least about 20% compared to administering a suitable control, and/or wherein said reduction of the number of HBV viral episomes or replication of the HBV gene or genome is at least about 20% compared to the number and/or replication in the subject before administering. Some aspects of this disclosure provide methods comprising administering an epigenetic editing system to a subject in need thereof, wherein the epigenetic editing system comprises a first DNA binding domain, a first DNMT domain, and a transcriptional repressor domain or one or more nucleic acid molecules encoding thereof, wherein the first DNA binding domain binds a first target region of a HBV gene or genome, and wherein the contacting results in a reduction of: number of HBV viral episomes, replication of the HBV gene or genome, or expression of a protein product encoded by the HBV gene or genome, wherein said reduction is at least about 20% compared to administering a suitable control, and/or wherein said reduction of the number of HBV viral episomes, of replication of the HBV gene or genome, or of expression of a protein product encoded by the HBV gene or genome is at least about 20% compared to the number, replication, and/or expression in the subject before administering. In some embodiments, the HBV genome is a covalently closed circular DNA (cccDNA) or an HBV integrated DNA. In some embodiments, the HBV genome comprises HBV genotype A, HBV genotype B, HBV genotype C, HBV genotype D, HBV genotype E, HBV genotype F, HBV genotype G or HBV genotype H. In some embodiments, the HBV genome comprises a sequence with at least 80% identity to an HBV genome sequence provided herein. In some embodiments, the first target region is located in a region of the HBV genome within nucleotide 0-303, 1000-2448 or 2802-3182 of an HBV genome provided herein. In some embodiments, the first target region of the HBV genome is located in a CpG island. In some embodiments, the first target region of the HBV genome is located in a promotor. In some embodiments, the first target region of the HBV genome is located in a section of the HBV genome that encodes a transcript selected from the group consisting of a pgRNA, a precure mRNA, a preS mRNA, a S mRNA, and a X mRNA. In some embodiments, the first DNA binding domain comprises a CRISPR-Cas protein. In some embodiments, the epigenetic editing system further comprises a first guide RNA (gRNA) that comprises a region complementary to a strand of the first target region. In some embodiments, the gRNA comprises a sequence selected from a gRNA provided and/or disclosed herein, e.g., in Table 14 and/or 15. In some embodiments, the first DNA binding domain comprises a zinc-finger protein. In some embodiments, the zinc-finger protein comprises a zinc-finger motif with a sequence selected from any zinc finger or zinc finger motif provided herein, e.g., in Table 1. In some embodiments, the zinc-finger protein comprises a sequence of any of the zinc finger epigenetic repressors provided herein. In some embodiments, the transcriptional repressor domain comprises ZIM3 In some embodiments, the first DNMT domain is a DNMT3A domain or a DNMT3L domain. In some embodiments, the first DNMT domain comprises a sequence of a DNMT domain provided herein. In some embodiments, the epigenetic editing system further comprises a second DNMT domain or a nucleic acid encoding thereof. In some embodiments, the second DNMT domain is a DNMT3A domain or a DNMT3L domain. In some embodiments, the second DNMT domain comprises a sequence of a DNMT domain provided herein. In some embodiments, the epigenetic editing system comprises a fusion protein or a nucleic acid encoding thereof, and wherein the fusion protein comprises the first DNA binding domain, the first DNMT domain, the repressor domain and the second DNMT domain. In some embodiments, the fusion protein further comprises a nuclear localization signal (NLS). In some embodiments, the fusion protein comprises a sequence of a fusion protein provided herein. In some embodiments, the epigenetic editing system further comprises a second DNA binding domain or a nucleic acid encoding thereof, wherein the second DNA binding domain binds a second target region of the HBV genome. In some embodiments, the second target region is located in a region of the HBV genome within nucleotide 0-303, 1000-2448 or 2802-3182. In some embodiments, the second target region of the HBV genome is located in a CpG island. In some embodiments, the second target region of the HBV genome is located in a promotor. In some embodiments, the second target region of the HBV genome is located in a section of the HBV genome that encodes a transcript selected from the group consisting of a pgRNA, a precure mRNA, a preS mRNA, a S mRNA, and a X mRNA. In some embodiments, the second DNA binding domain comprises a CRISPR-Cas protein. In some embodiments, the epigenetic editing system further comprises a second gRNA that comprises a region complementary to a strand of the second target region. In some embodiments, the gRNA comprises a sequence selected from a gRNA sequence provided herein, e.g., a sequence provided and/or disclosed in Table 14 and/or 15. In some embodiments, the second DNA binding domain comprises a zinc-finger protein. In some embodiments, the zinc-finger protein comprises a zinc-finger motif with a sequence selected from a zinc finger motif sequence provided herein, e.g., a zinc finger motif provided in Table 1. In some embodiments, the zinc-finger protein comprises a sequence of a zinc finger motif provided in Table 1. In some embodiments, the epigenetic editing system comprises a first fusion protein or a first nucleic acid encoding thereof and a second fusion protein or a second nucleic acid encoding thereof, wherein the first fusion protein comprises the first DNA binding domain and the first DNMT domain, and wherein the second fusion protein comprises the second DNA binding domain and the transcriptional repressor domain. In some embodiments, the first fusion protein comprises a sequence of a fusion protein provided herein. In some embodiments, the second fusion protein comprises a sequence of a fusion protein provided herein. In some embodiments, the epigenetic editing system further comprises a third DNA binding domain or a nucleic acid encoding thereof, wherein the third DNA binding domain binds to a third target region of the HBV genome. In some embodiments, the third target region is located in a region of the HBV genome within nucleotide 0-303, 1000-2448 or 2802-3182. In some embodiments, the third target region of the HBV genome is located in a CpG island. In some embodiments, the third target region of the HBV genome is located in a promotor. In some embodiments, the third target region of the HBV genome is located in a section of the HBV genome that encodes a transcript selected from the group consisting of a pgRNA, a precure mRNA, a preS mRNA, a S mRNA, and a X mRNA. In some embodiments, the third DNA binding domain comprises a CRISPR-Cas protein. In some embodiments, the epigenetic editing system further comprises a third gRNA that comprises a region complementary to a strand of the third target region. In some embodiments, the third gRNA comprises a sequence selected from a gRNA sequence provided herein, e.g., of a gRNA sequence provided and/or disclosed in Table 14 and/or 15. In some embodiments, the third DNA binding domain comprises a zinc-finger protein. In some embodiments, the zinc-finger protein comprises a zinc-finger motif with a sequence selected from a zinc finger motif provided herein. In some embodiments, the zinc-finger protein comprises a sequence of a zinc finger motif provided in Table 1. In some embodiments, the epigenetic editing system further comprises a second DNMT domain or a nucleic acid encoding thereof. In some embodiments, the second DNMT domain is a DNMT3A domain or a DNMT3L domain. In some embodiments, the epigenetic editing system comprises a third fusion protein or a nucleic acid encoding thereof, wherein the third fusion protein comprises the third DNA binding domain and the second DNMT domain. In some embodiments, the third fusion protein comprises a sequence of a fusion protein provided herein. In some embodiments, the epigenetic editing system comprises a nucleic acid sequence provided in Table 20. In some embodiments, the reduction of the number of HBV viral episomes, of replication of the HBV gene or genome, or of expression of a protein product encoded by the HBV gene or genome is at least about 20% compared to the number of HBV viral episomes, of replication of the HBV gene or genome, or of expression of a protein product encoded by the HBV gene or genome measured or observed before contacting the HBV genome with the epigenetic editing system, or before administering the epigenetic editing system to the subject. In some embodiments, the reduction of the number of HBV viral episomes, of replication of the HBV gene or genome, or of expression of a protein product encoded by the HBV gene or genome is at least about 25%, at least about 50%, at least about 75%, at least about 80%, at least about 90%, at least about 95%, at least about 99%, at least about 99.5%, at least about 99.8%, at least about 99.9%, at least about 99.95%, at least about 99.99%, or more than 99.99%, compared to the number of HBV viral episomes, of replication of the HBV gene or genome, or of expression of a protein product encoded by the HBV gene or genome measured or observed before contacting the HBV genome with the epigenetic editing system, or before administering the epigenetic editing system to the subject.

[0006] Some aspects of this disclosure provide epigenetic editing systems comprising: a fusion protein or a nucleic acid encoding the fusion protein, wherein the fusion protein comprises: (a) a DNA-binding domain that binds a target region of a HBV gene or genome, (b) a first DNA methyltransferase (DNMT) domain, and (c) a transcriptional repressor domain. In some embodiments, the epigenetic editing system is capable of reducing a number of the HBV viral episome, replication of the HBV, or expression of a gene product encoded by the HBV gene or genome, wherein said reduction is at least about 20% compared to contacting the HBV gene or genome with a suitable control. In some embodiments, the HBV genome is a covalently closed circular DNA (cccDNA) or an HBV integrated DNA. In some embodiments, the HBV genome comprises HBV genotype A, HBV genotype B, HBV genotype C, HBV genotype D, HBV genotype E, HBV genotype F, HBV genotype G or HBV genotype H. In some embodiments, the HBV genome comprises a sequence with at least 80% identity to an HBV genome sequence provided herein. In some embodiments, the target region is located in a region of the HBV genome within nucleotide 0-303, 1000-2448 or 2802-3182 of an HBV genome sequence provided herein. In some embodiments, the target region of the HBV genome is located in a CpG island. In some embodiments, the target region of the HBV genome is located in a promotor. In some embodiments, the target region of the HBV genome is located in a section of the HBV genome that encodes a transcript selected from the group consisting of a pgRNA, a precure mRNA, a preS mRNA, a S mRNA, and a X mRNA. In some embodiments, the DNA binding domain comprises a CRISPR-Cas protein. In some embodiments, the epigenetic editing system further comprises a gRNA that comprises a region complementary to a strand of the target region. In some embodiments, the gRNA comprises a sequence selected from a gRNA sequence provided herein, e.g., in Table 14 and/or 15. In some embodiments, the DNA binding domain comprises a zinc-finger protein. In some embodiments, the zinc-finger protein comprises a zinc-finger motif with a sequence selected from a zinc finger motif provided herein. In some embodiments, the zinc-finger protein comprises a sequence of a zinc finger motif provided in Table 1. In some embodiments, the transcriptional repressor domain comprises a sequence of a transcriptional repressor provided herein. In some embodiments, the first DNMT domain is a DNMT3A domain or a DNMT3L domain. In some embodiments, the DNMT domain comprises a sequence of a DNMT domain provided herein. In some embodiments, the fusion protein further comprises a second DNMT domain. In some embodiments, the second DNMT domain is a DNMT3A domain or a DNMT3L domain. In some embodiments, the fusion protein further comprises a nuclear localization signal (NLS). In some embodiments, the fusion protein comprises a sequence of a fusion protein provided herein. Some aspects of the present disclosure provide epigenetic editing systems comprising: a first fusion protein or a nucleic acid encoding the first fusion protein, wherein the first fusion protein comprises a first DNA binding domain and a first DNMT domain, wherein the first DNA binding domain binds a first target region of a HBV genome, and a second fusion protein or a nucleic acid encoding the second fusion protein, wherein the second fusion protein comprises a second DNA binding domain and a transcriptional repressor domain, wherein the second DNA binding domain binds a second target region of the HBV genome. In some embodiments, the epigenetic editing system is capable of reducing a number of the HBV viral episome, replication of the HBV, or expression of a gene product encoded by the HBV genome, wherein said reduction is at least about 20% compared to contacting the HBV genome with a suitable control. In some embodiments, the HBV genome is a covalently closed circular DNA (cccDNA) or an HBV integrated DNA. In some embodiments, the HBV genome comprises HBV genotype A, HBV genotype B, HBV genotype C, HBV genotype D, HBV genotype E, HBV genotype F, HBV genotype G or HBV genotype H In some embodiments, the HBV genome comprises a sequence with at least 80% identity to an HBV genome provided herein. In some embodiments, the epigenetic editing system further comprises a third fusion protein or a nucleic acid encoding the third fusion protein, wherein the third fusion protein comprises a third DNA binding domain and a second DNMT domain, wherein the third DNA binding domain binds a third target region of the HBV genome. In some embodiments, the first target region, the second target region or the third target region is located in a region of the HBV genome within nucleotide 0-303, 1000-2448 or 2802-3182 of an HBV genome provided herein In some embodiments, the first target region, the second target region or the third target region of the HBV genome is located in a CpG island In some embodiments, the first target region, the second target region or the third target region of the HBV genome is located in a promotor In some embodiments, the first target region, the second target region or the third target region of the HBV genome is located in a section of the HBV genome that encodes a transcript selected from the group consisting of a pgRNA, a precure mRNA, a preS mRNA, a S mRNA, and a X mRNA In some embodiments, the first DNA binding domain, the second DNA binding domain or the third DNA binding domain comprises a CRISPR-Cas protein. In some embodiments, the epigenetic editing system further comprises a first gRNA that comprises a region complementary to a strand of the first target region, a second gRNA that comprises a region complementary to a strand of the second target region or a third RNA that comprises a region complementary to a strand of the third target region. In some embodiments, the first gRNA comprises a sequence selected from a gRNA sequence provided herein, e.g., provided and/or disclosed in Table 14 and/or 15, the second gRNA comprises a sequence selected from a gRNA sequence provided herein, e.g., provided and/or disclosed in Table 14 and/or 15, and/or the third gRNA comprises a sequence selected from a gRNA sequence provided and/or disclosed herein, e.g., provided and/or disclosed in Table 14 and/or 15. In some embodiments, the first DNA binding domain, the second DNA binding domain or the third DNA binding domain comprises a zinc-finger protein In some embodiments, the zinc-finger protein comprises a zinc-finger motif with a sequence selected from a zinc finger motif provided herein In some embodiments, the zinc-finger protein comprises a sequence of a zinc finger motif provided in Table 1. In some embodiments, the transcriptional repressor domain comprises ZIM3. In some embodiments, the first DNMT domain is a DNMT3A domain or a DNMT3L domain. In some embodiments, the first DNMT domain comprises a sequence of a DNMT provided herein. In some embodiments, the second DNMT domain is a DNMT3A domain or a DNMT3L domain. In some embodiments, the second DNMT domain comprises a sequence of a DNMT domain provided herein. In some embodiments, the first fusion protein comprises a sequence of a fusion protein provided herein. In some embodiments, the second fusion protein comprises a sequence of a fusion protein provided herein. In some embodiments, the third fusion protein comprises a sequence of a fusion protein provided herein. In some embodiments of any of the previous methods, the epigenetic editing system comprises a nucleic acid sequence provided in Table 20. In some embodiments, the reduction of the number of HBV viral episomes, of replication of the HBV gene or genome, or of expression of a protein product encoded by the HBV gene or genome is at least about 20% compared to the number of HBV viral episomes, of replication of the HBV gene or genome, or of expression of a protein product encoded by the HBV gene or genome measured or observed before contacting the HBV genome with the epigenetic editing system, or before administering the epigenetic editing system to the subject. In some embodiments, the reduction of the number of HBV viral episomes, of replication of the HBV gene or genome, or of expression of a protein product encoded by the HBV gene or genome is at least about 25%, at least about 50%, at least about 75%, at least about 80%, at least about 90%, at least about 95%, at least about 99%, at least about 99.5%, at least about 99.8%, at least about 99.9%, at least about 99.95%, at least about 99.99%, or more than 99.99%, compared to the number of HBV viral episomes, of replication of the HBV gene or genome, or of expression of a protein product encoded by the HBV gene or genome measured or observed before contacting the HBV genome with the epigenetic editing system, or before administering the epigenetic editing system to the subject.

[0007] Some aspects of the present disclosure provide a method of treating an HDV infection in a subject comprising administering an epigenetic editing system to the subject, wherein the epigenetic editing system comprises a first DNA binding domain, a first DNMT domain, and a transcriptional repressor domain or one or more nucleic acid molecules encoding thereof, wherein the first DNA binding domain binds a first target region of a HBV gene or genome, and wherein the contacting results in a reduction of: number of HDV viral episomes, replication of the HDV gene or genome, or expression of a protein product encoded by the HDV gene or genome, wherein said reduction is at least about 20% compared to administering a suitable control. Some aspects of the present disclosure provide a method of inhibiting viral replication in a cell infected with an HDV comprising administering an epigenetic editing system, wherein the epigenetic editing system comprises a first DNA binding domain, a first DNMT domain, and a transcriptional repressor domain or one or more nucleic acid molecules encoding thereof, wherein the first DNA binding domain binds a first target region of a HBV gene or genome, and wherein the epigenetic editing system targets a target region of the HBV gene or genome, and wherein the contacting results in a reduction of number of HDV viral episomes or replication of the HDV gene or genome, wherein said reduction is at least about 20% compared to administering a suitable control. In some embodiments, the first DNA binding domain comprises a CRISPR-Cas protein. In some embodiments, the epigenetic editing system further comprises a first guide RNA (gRNA) that comprises a region complementary to a strand of the first target region. In some embodiments, the gRNA comprises a sequence selected from a gRNA provided herein, e.g., in Table 14 and/or 15. In some embodiments, the first DNA binding domain comprises a zinc-finger protein. In some embodiments, the zinc-finger protein comprises a zinc-finger motif with a sequence selected from any zinc finger or zinc finger motif provided herein, e.g., in Table 1 or Table 20. In some embodiments, the zinc-finger protein comprises a sequence of any of the zinc finger epigenetic repressors provided herein. In some embodiments, the transcriptional repressor domain comprises ZIM3. In some embodiments, the first DNMT domain is a DNMT3A domain or a DNMT3L domain. In some embodiments, the first DNMT domain comprises a sequence of a DNMT domain provided herein. In some embodiments, the epigenetic editing system further comprises a second DNMT domain or a nucleic acid encoding thereof. In some embodiments, the second DNMT domain is a DNMT3A domain or a DNMT3L domain. In some embodiments, the second DNMT domain comprises a sequence of a DNMT domain provided herein. In some embodiments, the epigenetic editing system comprises a fusion protein or a nucleic acid encoding thereof, and wherein the fusion protein comprises the first DNA binding domain, the first DNMT domain, the repressor domain and the second DNMT domain. In some embodiments, the fusion protein further comprises a nuclear localization signal (NLS). In some embodiments, the fusion protein comprises a sequence of a fusion protein provided herein. In some embodiments, the first DNA binding domain binds a target region of an HBV gene or genome encoding or controlling expression of an S-antigen. In some embodiments, the epigenetic editing system comprises a nucleic acid sequence provided in Table 20. In some embodiments, the reduction of the number of HBV viral episomes, of replication of the HBV gene or genome, or of expression of a protein product encoded by the HBV gene or genome is at least about 20% compared to the number of HBV viral episomes, of replication of the HBV gene or genome, or of expression of a protein product encoded by the HBV gene or genome measured or observed before contacting the HBV genome with the epigenetic editing system, or before administering the epigenetic editing system to the subject. In some embodiments, the reduction of the number of HBV viral episomes, of replication of the HBV gene or genome, or of expression of a protein product encoded by the HBV gene or genome is at least about 25%, at least about 50%, at least about 75%, at least about 80%, at least about 90%, at least about 95%, at least about 99%, at least about 99.5%, at least about 99.8%, at least about 99.9%, at least about 99.95%, at least about 99.99%, or more than 99.99%, compared to the number of HBV viral episomes, of replication of the HBV gene or genome, or of expression of a protein product encoded by the HBV gene or genome measured or observed before contacting the HBV genome with the epigenetic editing system, or before administering the epigenetic editing system to the subject.

[0008] Some aspects of the present disclosure provide an epigenetic editing system for modifying an epigenetic state of a hepatitis B virus (HBV) gene or genome comprising a fusion protein, or a nucleic acid encoding the fusion protein, wherein the fusion protein comprises a DNA-binding domain that binds a target region of an HBV genome, wherein the DNA binding domain comprises a catalytically inactive CRISPR-Cas protein, an epigenetic repression domain, and a gRNA, or a nucleic acid encoding the gRNA, wherein the gRNA comprises a region complementary to a strand of the target region of the HBV genome, wherein the HBV genome is a covalently closed circular DNA (cccDNA) or an HBV integrated DNA, wherein the target region of the HBV genome is located in a region within nucleotide 0-303, 1000-2448 or 2802-3182, and wherein the HBV genome comprises HBV genotype A, HBV genotype B, HBV genotype C, HBV genotype D, HBV genotype E, HBV genotype F, HBV genotype G or HBV genotype H. In some embodiments of the present disclosure, the HBV genome comprises a nucleotide sequence provided in SEQ ID NO: 1082 and/or SEQ ID NO: 1083, or a sequence having at least 80%, at least 85%, at least 90%, at least 95%, or at least 98%, at least 99%, or at least 99.5% identity to SEQ ID NO: 1082 and/or SEQ ID NO: 1083. In some embodiments, the target region of the HBV genome is located in a region within nucleotide 0-303. In some embodiments, the target region of the HBV genome is located in a region within nucleotide 1000-2448. In some embodiments, the target region of the HBV genome is located in a region within nucleotide 2802-3182. In some embodiments, the target region comprises a sequence corresponding to any of SEQ ID NOs: 333-475, or any combination thereof. In some embodiments, the gRNA comprises a targeting domain corresponding to any of SEQ ID NOs: 333-475, or any combination thereof. In some embodiments of the present disclosure, the gRNA comprises a sequence corresponding to any of SEQ ID NOs: 1093-1235, or any combination thereof. In some embodiments of the present disclosure, the target region comprises a sequence corresponding to any of SEQ ID NO: SEQ ID NO: 345, SEQ ID NO: 390, SEQ ID NO: 391, SEQ ID NO: 389, SEQ ID NO: 411, SEQ ID NO: 441, or SEQ ID NO: 457, or any combination thereof. In some embodiments of the present disclosure, the gRNA comprises a targeting domain corresponding to any of SEQ ID NO: 345, SEQ ID NO: 390, SEQ ID NO: 391, SEQ ID NO: 389, SEQ ID NO: 411, SEQ ID NO: 441, or SEQ ID NO: 457, or any combination thereof. In some embodiments of the present disclosure, the gRNA comprises a sequence corresponding to any of SEQ ID NO: 1105, SEQ ID NO: 1150, SEQ ID NO: 1151, SEQ ID NO: 1149, SEQ ID NO: 1171, SEQ ID NO: 1201, or SEQ ID NO: 1217, or any combination thereof. In some embodiments of the present disclosure, the fusion protein comprises a DNMT domain. In some embodiments, the fusion protein comprises a DNMT3A and/or a DNMT3L domain. In some embodiments of the present disclosure, the fusion protein of comprises a KRAB domain. In some embodiments of the present disclosure, the fusion protein of comprises a nuclear localization signal (NLS).

[0009] Some aspects of the present disclosure comprise a method comprising contacting an HBV genome with an epigenetic editing system, wherein the epigenetic editing system comprises a fusion protein, or a nucleic acid encoding the fusion protein, wherein the fusion protein comprises a DNA-binding domain that binds a target region of an HBV genome, wherein the DNA binding domain comprises a catalytically inactive CRISPR-Cas protein, an epigenetic repression domain, and a gRNA, or a nucleic acid encoding the gRNA, wherein the gRNA comprises a region complementary to a strand of the target region of the HBV genome, wherein the HBV genome is a covalently closed circular DNA (cccDNA) or an HBV integrated DNA, wherein the target region of the HBV genome is located in a region within nucleotide 0-303, 1000-2448 or 2802-3182, and wherein the HBV genome comprises HBV genotype A, HBV genotype B, HBV genotype C, HBV genotype D, HBV genotype E, HBV genotype F, HBV genotype G or HBV genotype H. In some embodiments of the present disclosure, the HBV genome comprises a nucleotide sequence provided in SEQ ID NO: 1082 and/or SEQ ID NO: 1083. In some embodiments of the present disclosure, the target region comprises a sequence corresponding to any of SEQ ID NOs: 333-475, or any combination thereof. In some embodiments, the gRNA comprises a targeting domain corresponding to any of SEQ ID NOs: 333-475, or any combination thereof. In some embodiments, the gRNA comprises a sequence corresponding to any of SEQ ID NOs: 1093-1235, or any combination thereof. In some embodiments, the target region comprises a sequence corresponding to any of SEQ ID NO: SEQ ID NO: 345, SEQ ID NO: 390, SEQ ID NO: 391, SEQ ID NO: 389, SEQ ID NO: 411, SEQ ID NO: 441, or SEQ ID NO: 457, or any combination thereof. In some embodiments, the gRNA comprises a targeting domain corresponding to any of SEQ ID NO: 345, SEQ ID NO: 390, SEQ ID NO: 391, SEQ ID NO: 389, SEQ ID NO: 411, SEQ ID NO: 441, or SEQ ID NO: 457, or any combination thereof. In some embodiments, the gRNA comprises a sequence corresponding to any of SEQ ID NO: 1105, SEQ ID NO: 1150, SEQ ID NO: 1151, SEQ ID NO: 1149, SEQ ID NO: 1171, SEQ ID NO: 1201, or SEQ ID NO: 1217, or any combination thereof. In some embodiments of the present disclosure, the fusion protein comprises a DNMT domain. In some embodiments, the fusion protein comprises a DNMT3A and/or a DNMT3L domain. In some embodiments of the present disclosure, the fusion protein comprises a KRAB domain. In some embodiments of the present disclosure, the fusion protein comprises a nuclear localization signal (NLS). In some embodiments of the present disclosure, the method further comprises measuring number of HBV viral episomes, replication of the HBV genome, and/or expression of a protein product encoded by the HBV genome. In some embodiments, the contacting results in a reduction of at least about 80% of number of HBV viral episomes, replication of the HBV genome, and/or expression of a protein product encoded by the HBV genome compared to contacting the HBV genome with a suitable control. In some embodiments of the present disclosure, the measuring is performed 14 days or more after the contacting.

[0010] Other features, objectives, and advantages of the invention are apparent in the detailed description that follows. It should be understood, however, that the detailed description, while indicating embodiments and embodiments of the invention, is given by way of illustration only, not limitation. Various changes and modifications within the scope of the invention will become apparent to those skilled in the art from the detailed description.

### BRIEF DESCRIPTION OF THE DRAWINGS

[0011] FIG. 1 is a diagram illustrating an exemplary structure of a circular HBV genome. HBV genes and CpG islands are indicated. Exemplary target sites for CRISPR-based epigenetic repressors (red arrows) as well as for zinc-finger-based epigenetic repressors (green arrows) are identified.

[0012] FIG. 2 is a heat map showing conservation of guide RNA target domains across different HBV genotypes.

[0013] FIG. 3 is a bar graph illustrating the geographical distribution of different HBV genotypes.

[0014] FIG. 4A is a diagram describing the experimental timeline for testing different CRISPR-based epigenetic repressors in HepAD38 cells, which express HPV in a doxycycline-inducible manner. FIG. 4B is a diagram showing the repression of HBV by various CRISPR-based epigenetic repressors (#1.1-3.2). Controls: UT: untransfected control; GFP: transfection control without repressor; HBV-KO: CRISPR nuclease mediated knockout; sgRNA scramble: CRISPR-based repressor with sgRNA not targeting HBV; B2M: CRISPR-based repressor with sgRNA targeting B2M.

[0015] FIG. 5A is a diagram describing the experimental timeline for testing different CRISPR-based epigenetic repressors in a HepG2-NTCP infection model (see, e.g., Methods Mol Biol. 2017; 1540:1-14). FIG. 5B is a diagram showing the expression of HBe antigen (via ELISA) at different times after treatment of HBV-infected Hep2G-NTCT cells with different doses of CRISPR-based epigenetic repressors (ETRs), or with different doses of Cas9 nuclease targeting HBV (Cas9), plotted normalized to the expression value of HBe antigen measured for a negative control (empty).

[0016] FIG. 6 is a diagram describing the experimental timeline for a guide RNA screen testing different CRISPR-based epigenetic repressor systems in a HepG2-NTCP infection model with ELISA readout for HBe and HBs antigens at day 6.

[0017] FIG. 7 is a diagram showing QC results from different LNP batches used in the guide screen.

[0018] FIG. 8 is a bar graph showing the expression of HBe and HBs for an exemplary CRISPR-based epigenetic repressor (#3.2), calculated as the percentage of the expression of the respective antigen measured for a non-targeting control.

[0019] FIG. 9 is a diagram showing HBe expression values measured in the guide RNA screen for different guides (calculated as a percentage of the expression of HBe measured for a non-targeting control). Each guide/repressor combination is represented by a dot. A 50% repression cutoff is shown as a horizontal line. The position of the respective guide RNA within the HBV genome (shown at the bottom of the graph) is mapped on the X-axis. The position and the measured modulation of HBe expression for exemplary guide RNA #3.2 is indicated by red lines.

[0020] FIG. 10 is a diagram showing HBs expression values measured in the guide RNA screen for different guides (calculated as a percentage of the expression of HBs measured for a non-targeting control). Each guide/repressor combination is represented by a dot. A 50% repression cutoff is shown as a horizontal line. The position of the respective guide RNA within the HBV genome (shown at the bottom of the graph) is mapped on the X-axis. The position and the measured modulation of HBs expression for exemplary guide RNA #3.2 is indicated by red lines.

[0021] FIG. 11 is a diagram showing a correlation between HBs and HBe expression for the guides tested. The graph on the right shows HBe and HBs repression efficiencies for 25 exemplary guides.

[0022] FIG. 12A is a diagram describing the experimental timeline for a guide RNA assay testing CRISPR-off single construct epigenetic editor in combination with individual exemplary gRNAs in a HepG2-NTCP infection model with ELISA readout for HBe and HBs antigens at day 6; and FIG. 12B is a graph summarizing the percentage reduction in HBV antigens at day 6 relative to non-targeting control.

[0023] FIG. 13A is a diagram describing the experimental timeline for a guide RNA assay testing CRISPR-off single construct epigenetic editor in combination with individual exemplary gRNAs in a PLC/PRF/5 cell model with ELISA readout for HBs antigen at day 4; and FIG. 13B is a graph summarizing the percentage reduction in HBs antigen at day 4 relative to non-targeting control.

[0024] FIG. 14A is a diagram describing the experimental timeline for a guide RNA assay testing CRISPR-off single construct epigenetic editor in combination with individual exemplary gRNAs in a PXB cell model with ELISA readout for HBe and HBs antigens at day 6; and FIG. 14B is a graph summarizing the percentage reduction in HBV antigens at day 6 relative to non-targeting control. FIG. 14C is a diagram describing the experimental timeline for a guide RNA assay testing CRISPR-off single construct epigenetic editor in combination with individual exemplary gRNAs in a PXB cell model with ELISA readout for HBe and HBs antigens at day 12. FIG. 14D is a graph summarizing the percentage reduction in HBV antigens at day 12 relative to non-targeting control. Bars represent mean±SEM; N=5. EE1=PLA002 and gRNA #007, EE2=PLA002 and gRNA #008, EE3=PLA002 and gRNA #009, EE4=PLA002 and gRNA #015, and EE5=PLA002 and gRNA #011.

[0025] FIG. 15A is a diagram describing the experimental timeline for a zinc finger assay testing ZF-off single construct epigenetic editor that contains individual exemplary zinc finger motif in a HepG2-NTCP infection model with ELISA readout for HBe and HBs antigens at day 6; and FIG. 15B is a graph summarizing the percentage reduction in HBV antigens at day 6 relative to non-targeting control. “N” denotes non-targeting control, “P” denotes the positive control, and the individual numbers on the x-axis denote exemplary constructs tested in the experiment, for instance, “1” represents “mRNA0001” construct, and “20” represents “mRNA0020” construct.

[0026] FIG. 16A is a graph summarizing the results of top ten ZF-off constructs from FIG. 15B. FIG. 16B is a diagram showing HBsAg (top) and HBeAg (middle) expression values measured in the ZF-off screen (calculated as a percentage of the expression of HBsAg or HBeAg—top and middle, respectively—measured for a non-targeting control). Each ZF-off construct is represented by a dot. 50% and 60% repression cutoffs are shown as horizontal lines. The position of the respective guide RNA within the HBV genome (bottom) is mapped on the X-axis.

[0027] FIG. 17 is an experimental timeline for testing dose response (top) and two graphs showing dose response of % HbsAg (bottom left) and % HbeAg (bottom right) in HepG2-NTCP cells upon administration of ZF fusion proteins. The mRNA corresponding to the ZF motif for each fusion protein is indicated.

[0028] FIG. 18 is an experimental timeline for testing durable silencing of HBsAg (top) and a graph showing the durability of HBsAg silencing by ZF fusion proteins (bottom). The mRNA corresponding to the ZF motif for each fusion protein is indicated.

[0029] FIG. 19 is an experimental timeline for testing HBsAg silencing in a PLC/PRF/5 in vitro model (top) and a graph showing % HBsAg relative to control on Day 14 after administration of ZF fusion proteins. The mRNA corresponding to the ZF motif for each fusion protein is indicated. Information about the % match to target for each construct is also indicated.

[0030] FIG. 20A is a volcano plot showing differentially expressed (DE) genes for an exemplary ZF specificity assay. DE genes are shown with dots. FIG. 20B is a volcano plot showing DE for CRISPR-off and gRNA epigenetic editors. Points represent genes with their change in expression (x-axis) and statistical significance of that change (y-axis). EE1=PLA002 and gRNA #007, EE2=PLA002 and gRNA #008, EE3=PLA002 and gRNA #009, EE4=PLA002 and gRNA #015, and EE5=PLA002 and gRNA #011. Also shown are results for low specificity and host target gene controls. FIGS. 20C-20D are scatter plots showing methylation levels between treatment (y-axis) and control (x-axis) for 935,000 CpG sites in the human genome. Lines represent thresholds for changes in methylation considered significant (absolute [methylation difference]>=0.2). DMRs are noted on each figure. Results for a host target (PCSK9, next-to-final panel) as well as a low specificity control (final panel) are also shown. FIG. 20C shows the results versus effector only. FIG. 20D shows the results versus no treatment. EE1=PLA002 and gRNA #007, EE2=PLA002 and gRNA #008, EE3=PLA002 and gRNA #009, EE4=PLA002 and gRNA #015, EE5=PLA002 and gRNA #011, EE6=PLA002 and gRNA #003, and EE7=PLA002 and gRNA #016.

[0031] FIG. 21 is an illustration of an experimental schematic for an in vivo study of multiplexing ZF fusion protein effectors.

### DETAILED DESCRIPTION OF THE INVENTION

[0032] The present disclosure provides epigenetic editors, and strategies and methods of using such epigenetic editors, for regulating expression of HBV. By altering expression of HBV, and in particular, by repressing expression of HBV, e.g., of a gene comprised in the HBV genome or a gene product encoded by the HBV genome, the compositions and methods described herein are useful to suppress viral function in infected cells, e.g., in the context of treating an HBV infection in a human subject, or in the context of treating CHB.

[0033] The structure and biology of HBV as well as HBV-associated diseases have been reported (see, for example, Yuen, M F., Chen, D S., Dusheiko, G. et al. Hepatitis B virus infection. Nat Rev Dis Primers 4, 18035 (2018), incorporated herein by reference in its entirety).

[0034] Exemplary HBV sequences can be found at various NCBI database entries, e.g., representative sequences can be found under accession numbers NC_003977.2 and U95551, which are incorporated herein by reference in their entirety, and the sequences of which are provided elsewhere herein.

[0035] A number of treatment options for HBV has been reported, but there remains a need for effective treatment of HBV infections. Genetic editing approaches targeting HBV genomes for cutting of genomic DNA are associated with a risk of off-target cutting and genomic translocations. The present epigenetic editors and related methods of use have several advantages compared to other genome engineering methods, including increased efficiency, decreased risk of translocation, and durable silencing of HBV.

[0036] Hepatitis D virus (HDV) is the smallest pathogen known to infect humans. HDV infection is only found in patients infected with HBV, as HDV relies on HBV functions for most of its functions, including viral packaging, infectivity, transmission, and inhibition of host immunity. About 5% of patients with HBV infection also have an HDV infection. HDV uses HBV S-antigen (HBsAg) as a capsid protein, and HDV infection is therefore dependent on HBV S-antigen production. Decreasing HBV S-antigen expression also reduces HDV infectivity. The structure and biology of HDV has been reported (see, for example, Asselah and Rizzetto, Hepatitis D Virus Infection, The New England Journal of Medicine (359;1; Jul. 6, 2023), incorporated herein by reference in its entirety). In some embodiments of the present disclosure, HDV infection is addressed through methods targeting an HBV gene or genome.

[0037] In some embodiments, an epigenetic editor as described herein may comprise one or more fusion proteins, wherein each fusion protein comprises a DNA-binding domain linked to one or more effector domains for epigenetic modification. In certain embodiments, where the DNA-binding domain is a polynucleotide guided DNA-binding domain, the epigenetic editor may further comprise one or more guide polynucleotides. DNA-binding domains, effector domains, and guide polynucleotides of an epigenetic editor as described herein may be selected, e.g., from those described below, in any functional combination.

[0038] The epigenetic editors described herein may be expressed in a host cell transiently, or may be integrated in a genome of the host cell; such cells and their progeny are also contemplated by the present disclosure. Both transiently expressed and integrated epigenetic editors or components thereof can effect stable epigenetic modifications. For example, after introducing to a host cell an epigenetic editor described herein, the target gene in the host cell may be stably or permanently repressed or silenced. For example, in some embodiments provided herein, a transiently expressed epigenetic editor comprising a DNMT3A domain, a DNMT3L domain, and a KRAB domain effects stable epigenetic modifications. For example, in some embodiments provided herein, a constitutively expressed epigenetic editor comprising DNMT3A and a DNMT3L domain effects stable epigenetic modifications. In some embodiments, expression of the target gene is reduced or silenced for at least 1 week, at least 2 weeks, at least 3 weeks, at least 4 weeks, at least 5 weeks, at least 6 weeks, at least 7 weeks, at least 2 months, at least 3 months, at least 4 months, at least 5 months, at least 6 months, at least 1 year, at least 2 years, or for the entire lifetime of the cell or the subject carrying the cell, as compared to the level of expression in the absence of the epigenetic editor. The epigenetic modification may be inherited by the progeny of the host cells into which the epigenetic editor was introduced.

[0039] The present epigenetic editors may be introduced to a patient in need thereof (e.g., a human patient), e.g., into the patient's hepatocytes, biliary epithelial cells (cholangiocytes), stellate cells, Kupffer cells, and liver sinusoidal endothelial cells.

### I. DNA-Binding Domains

[0040] An epigenetic editor described herein may comprise one or more DNA-binding domains that direct the effector domain(s) of the epigenetic editor to target sequences within an HBV genome. A DNA-binding domain as described herein may be, e.g., a polynucleotide guided DNA-binding domain, a zinc finger protein (ZFP) domain, a transcription activator like effector (TALE) domain, a meganuclease DNA-binding domain, and the like. Examples of DNA-binding domains can be found in U.S. Pat. No. 11,162,114, which is incorporated by refence herein in its entirety.

[0041] In some embodiments, a DNA-binding domain described herein is encoded by its native coding sequence. In other embodiments, the DNA-binding domain is encoded by a nucleotide sequence that has been codon-optimized for optimal expression in human cells.

[0042] A. Polynucleotide Guided DNA-Binding Domains

[0043] In some embodiments, a DNA-binding domain herein may be a protein domain directed by a guide nucleic acid sequence (e.g., a guide RNA sequence) to a target site in an HBV genome. In certain embodiments, the protein domain may be derived from a CRISPR-associated nuclease, such as a Class I or II CRISPR-associated nuclease. In some embodiments, the protein domain may be derived from a Cas nuclease such as a Type II, Type IIA, Type IIB, Type IIC, Type V, or Type VI Cas nuclease. In certain embodiments, the protein domain may be derived from a Class II Cas nuclease selected from Cas1, Cas1B, Cas2, Cas3, Cas4, Cas5, Cas6, Cas7, Cas8, Cas9, Cas10, Cas14a, Cas14b, Cas14c, CasX, CasY, CasPhi, C2c4, C2c8, C2c9, C2c10, Csy1, Csy2, Csy3, Cse1, Cse2, Csc1, Csc2, Csa5, Csn2, Csm2, Csm3, Csm4, Csm5, Csm6, Cmr1, Cmr3, Cmr4, Cmr5, Cmr6, Csb1, Csb2, Csb3, Csx17, Csx14, Csx10, Csx16, CsaX, Csx3, Csx1, Csx1S, Csf1, Csf2, CsO, Csf4, and homologues and modified versions thereof “Derived from” is used to mean that the protein domain comprises the full polypeptide sequence of the parent protein, or comprises a variant thereof (e.g., with amino acid residue deletions, insertions, and/or substitutions). The variant retains the desired function of the parent protein (e.g., the ability to form a complex with the guide nucleic acid sequence and the target DNA).

[0044] In some embodiments, the CRISPR-associated protein domain may be a Cas9 domain described herein. Cas9 may, for example, refer to a polypeptide with at least about 85%, 90%, 91%, 92%, 93%, 94%, 95%, 96%, 97%, 98%, 99%, or 100% sequence identity and/or sequence similarity to a wildtype Cas9 polypeptide described herein. In some embodiments, said wildtype polypeptide is Cas9 from Streptococcus pyogenes (NCBI Ref. No. NC_002737.2 (SEQ ID NO: 1)) and/or UniProt Ref. No. Q99ZW2 (SEQ ID NO: 2). In some embodiments, said wildtype polypeptide is Cas9 from Staphylococcus aureus (SEQ ID NO: 3). In some embodiments, the CRISPR-associated protein domain is a Cpf1 domain or protein, or a polypeptide with at least about 85%, 90%, 91%, 92%, 93%, 94%, 95%, 96%, 97%, 98%, 99%, or 100% sequence identity and/or sequence similarity to a wildtype Cpf1 polypeptide described herein (e.g., Cpf1 from Franscisella novicida (UniProt Ref. No. U2UMQ6 or SEQ ID NO: 4). In certain embodiments, the CRISPR-associated protein domain may be a modified form of the wildtype protein comprising one or more amino acid residue changes such as a deletion, an insertion, or a substitution; a fusion or chimera; or any combination thereof.

[0045] Cas9 sequences and structures of variant Cas9 orthologs have been described for various organisms. Exemplary organisms from which a Cas9 domain herein can be derived include, but are not limited to, Streptococcus pyogenes, Streptococcus thermophilus, Streptococcus sp., Staphylococcus aureus, Listeria innocua, Lactobacillus gasseri, Francisella novicida, Wolinella succinogenes, Sutterella wadsworthensis, Gamma proteobacterium, Neisseria meningitidis, Campylobacter jejuni, Pasteurella multocida, Fibrobacter succinogene, Rhodospirillum rubrum, Nocardiopsis dassonvillei, Streptomyces pristinaespiralis, Streptomyces viridochromogenes, Streptomyces viridochromogenes, Streptosporangium roseum, Alicyclobacillus acidocaldarius, Bacillus pseudomycoides, Bacillus selenitireducens, Exiguobacterium sibiricum, Lactobacillus delbrueckii, Lactobacillus salivarius, Lactobacillus buchneri, Treponema denticola, Microscilla marina, Burkholderiales bacterium, Polar omonas naphthalenivorans, Polar omonas sp., Crocosphaera watsonii, Cyanothece sp., Microcystis aeruginosa, Synechococcus sp., Acetohalobium arabaticum, Ammonifex degensii, Caldicelulosiruptor becscii, Candidatus Desulforudis, Clostridium botulinum, Clostridium difficile, Finegoldia magna, Natranaerobius thermophilus, Pelotomaculum thermopropionium, Acidithiobacillus caldus, Acidithiobacillus ferrooxidans, Allochromatium vinosum, Marinobacter sp., Nitrosococcus halophilus, Nitrosococcus watsoni, Pseudoalteromonas haloplanktis, Ktedonobacter racemifer, Methanohalobium evestigatum, Anabaena variabilis, Nodularia spumigena, Nostoc sp., Arthrospira maxima, Arthrospira platensis, Arthrospira sp., Lyngbya sp., Microcoleus chthonoplastes, Oscillator ia sp., Petrotoga mobilis, Thermosipho africanus, Streptococcus pasteurianus, Neisseria cinerea, Campylobacter lari, Parvibaculum lavamentivorans, Coryne bacterium diphtheria, and Acaryochloris marina. Cas9 sequences also include those from the organisms and loci disclosed in Chylinski et al., RNA Biol. (2013) 10(5):726-37.

[0046] In some embodiments, the Cas9 domain is from Streptococcus pyogenes. In some embodiments, the Cas9 domain is from Staphylococcus aureus.

[0047] Other Cas domains are also contemplated for use in the epigenetic editors herein. These include, for example, those from CasX (Cas12E) (e.g., SEQ ID NO: 5), CasY (Cas12d) (e.g., SEQ ID NO: 6), Caw (CasPhi) (e.g., SEQ ID NO: 7), Cas12f1 (Cas14a) (e.g., SEQ ID NO: 8), Cas12f2 (Cas14b) (e.g., SEQ ID NO: 9), Cas12f3 (Cas14c) (e.g., SEQ ID NO: 10), and C2c8 (e.g., SEQ ID NO: 11).

[0048] For epigenetic editing, the nuclease-derived protein domain (e.g., a Cas9 or Cpf1 domain) may have reduced or no nuclease activity through mutations such that the protein domain does not cleave DNA or has reduced DNA-cleaving activity while retaining the ability to complex with the guide nucleic acid sequence (e.g., guide RNA) and the target DNA. For example, the nuclease activity may be reduced by at least 30%, 35%, 40%, 45%, 50%, 55%, 60%, 65%, 70%, 75%, 80%, 85%, 90%, 95%, or 99% compared to the wildtype domain. In some embodiments, a CRISPR-associated protein domain described herein is catalytically inactive (“dead”). Examples of such domains include, for example, dCas9 (“dead” Cas9), dCpf1, ddCpf1, dCasPhi, ddCas12a, dLbCpf1, and dFnCpf1. A dCas9 protein domain, for example, may comprise one, two, or more mutations as compared to wildtype Cas9 that abrogate its nuclease activity. The DNA cleavage domain of Cas9 is known to include two subdomains: the HNH nuclease subdomain and the RuvC1 subdomain. The HNH subdomain cleaves the strand complementary to the gRNA, whereas the RuvC1 subdomain cleaves the non-complementary strand. Mutations within these subdomains can silence the nuclease activity of Cas9. For example, the mutations D10A (in RuvC1) and H840A (in HNH) completely inactivate the nuclease activity of SpCas9. SaCas9, similarly, may be inactivated by the mutations D10A and N580A. In some embodiments, the dCas9 comprises at least one mutation in the HNH subdomain and/or the RuvC1 subdomain that reduces or abrogates nuclease activity. In some embodiments, the dCas9 only comprises a RuvC1 subdomain, or only comprises an HNH subdomain. It is to be understood that any mutation that inactivates the RuvC1 and/or the HNH domain may be included in a dCas9 herein, e.g., insertion, deletion, or single or multiple amino acid substitution in the RuvC1 domain and/or the HNH domain.

[0049] In some embodiments, a dCas9 protein herein comprises a mutation at position(s) corresponding to position D10 (e.g., D10A), H840 (e.g., H840A), or both, of a wildtype SpCas9 sequence as numbered in the sequence provided at UniProt Accession No. Q99ZW2 (SEQ ID NO: 2). In particular embodiments, the dCas9 comprises the amino acid sequence of dSpCas9 (D10A and H840A) (SEQ ID NO: 12).

[0050] In some embodiments, a dCas9 protein as described herein comprises a mutation at position(s) corresponding to position D10 (e.g., D10A), N580 (e.g., N580A), or both, of a wildtype SaCas9 sequence (e.g., SEQ ID NO: 9). In particular embodiments, the dCas9 comprises the amino acid sequence of dSaCas9 (D10A and N580A) (SEQ ID NO.: 13).

[0051] Additional suitable mutations that inactivate Cas9 will be apparent to those of skill in the art based on this disclosure and knowledge in the field and are within the scope of this disclosure. Such mutations may include, but are not limited to, D839A, N863A, and/or K603R in SpCas9. The present disclosure contemplates any mutations that reduce or abrogate the nuclease activity of any Cas9 described herein (e.g., mutations corresponding to any of the Cas9 mutations described herein).

[0052] A dCpf1 protein domain may comprise one, two, or more mutations as compared to wildtype Cpf1 that reduce or abrogate its nuclease activity. The Cpf1 protein has a RuvC-like endonuclease domain that is similar to the RuvC domain of Cas9, but does not have an HNH endonuclease domain, and the N-terminal of Cpf1 does not have the alpha-helical recognition lobe of Cas9. In some embodiments, the dCpf1 comprises one or more mutations corresponding to position D917A, E1006A, or D1255A as numbered in the sequence of the Francisella novicida Cpf1 protein (FnCpf1; SEQ ID NO: 4). In certain embodiments, the dCpf1 protein comprises mutations corresponding to D917A, E1006A, D1255A, D917A/E1006A, D917A/D1255A, E1006A/D1255A, or D917A/E1006A/D1255A, or corresponding mutation(s) in any of the Cpf1 amino acid sequences described herein. In some embodiments, the dCpf1 comprises a D917A mutation. In particular embodiments, the dCpf1 comprises the amino acid sequence of dFnCpf1 (SEQ ID NO: 14).

[0053] Further nuclease inactive CRISPR-associated protein domains contemplated herein include those from, for example, dNmeCas9 (e.g., SEQ ID NO: 15), dCjCas9 (e.g., SEQ ID NO: 16), dSt1Cas9 (e.g., SEQ ID NO: 17), dSt3Cas9 (e.g., SEQ ID NO: 18), dLbCpf1 (e.g., SEQ ID NO: 19), dAsCpf1 (e.g., SEQ ID NO: 20), denAsCpf1 (e.g., SEQ ID NO: 21), dHFAsCpf1 (e.g., SEQ ID NO: 22), dRVRAsCpf1 (e.g., SEQ ID NO: 23), dRRAsCpf1 (e.g., SEQ ID NO: 24), dCasX (e.g., SEQ ID NO: 25), and dCasPhi (e.g., SEQ ID NO: 26).

[0054] In some embodiments, a Cas9 domain described herein may be a high fidelity Cas9 domain, e.g., comprising one or more mutations that decrease electrostatic interactions between the Cas9 domain and the sugar-phosphate backbone of DNA to confer increased target binding specificity. In certain embodiments, the high fidelity Cas9 domain may be nuclease inactive as described herein.

[0055] A CRISPR-associated protein domain described herein may recognize a protospacer adjacent motif (PAM) sequence in a target gene. A “PAM” sequence is typically a 2 to 6 bp DNA sequence immediately following the sequence targeted by the CRISPR-associated protein domain. The PAM sequence is required for CRISPR protein binding and cleavage but is not part of the target sequence. The CRISPR-associated protein domain may either recognize a naturally occurring or canonical PAM sequence or may have altered PAM specificity. CRISPR-associated protein domains that bind to non-canonical PAM sequences have been described in the art. For example, Cas9 domains that bind non-canonical PAM sequences have been described in Kleinstiver et al., Nature (2015) 523(7561):481-5 and Kleinstiver et al., Nat Biotechnol. (2015) 33:1293-8. Such Cas9 domains may include, for example, those from “VRER” SpCas9, “EQR” SpCas9, “VQR” SpCas9, “SpG Cas9,” “SpRYCas9,” and “KKH” SaCas9. Nuclease inactive versions of these Cas9 domains are also contemplated, such as nuclease inactive VRER SpCas9 (e.g., SEQ ID NO: 27), nuclease inactive EQR SpCas9 (e.g., SEQ ID NO: 28), nuclease inactive VQR SpCas9 (e.g., SEQ ID NO: 29), nuclease inactive SpG Cas9 (e.g., SEQ ID NO: 30), nuclease inactive SpRY Cas9 (e.g., SEQ ID NO: 31), and nuclease inactive KKH SaCas9 (e.g., SEQ ID NO: 32). Another example is the Cas9 of Francisella novicida engineered to recognize 5′-YG-3′ (where “Y” is a pyrimidine).

[0056] Additional suitable CRISPR-associated proteins, orthologs, and variants, including nuclease inactive variants and sequences, will be apparent to those of skill in the art based on this disclosure.

[0057] Guide RNAs that can be used in conjunction with the CRISPR-associated protein domains herein are further described in Section II below.

[0058] B. Zinc Finger Protein Domains

[0059] In some embodiments, the DNA-binding domain of an epigenetic editor described herein comprises a zinc finger protein (ZFP) domain (or “ZF domain” as used herein). ZFPs are proteins having at least one zinc finger, and bind to DNA in a sequence-specific manner. A “zinc finger” (ZF) or “zinc finger motif” (ZF motif) refers to a polypeptide domain comprising a beta-beta-alpha (ββα)-protein fold stabilized by a zinc ion. A ZF binds from two to four base pairs of nucleotides, typically three or four base pairs (contiguous or noncontiguous). Each ZF typically comprises approximately 30 amino acids. ZFP domains may contain multiple ZFs that make tandem contacts with their target nucleic acid sequence. A tandem array of ZFs may be engineered to generate artificial ZFPs that bind desired nucleic acid targets. ZFPs may be rationally designed by using databases comprising triplet (or quadruplet) nucleotide sequences and individual ZF amino acid sequences, in which each triplet or quadruplet nucleotide sequence is associated with one or more amino acid sequences of ZFs that bind the particular triplet or quadruplet sequence. See, e.g., U.S. Pat. Nos. 6,453,242, 6,534,261, and 8,772,453.

[0060] ZFPs are widespread in eukaryotic cells, and may belong to, e.g., C2H2 class, CCHC class, PHD class, or RING class. An exemplary motif characterizing one class of these proteins (C2H2 class) is -Cys-(X)₂₋₄-Cys-(X)₁₂-His-(X)₃₋₅-His- (SEQ ID NO:1091), where X is any independently chosen amino acid. In some embodiments, a ZFP domain herein may comprise a ZF array comprising sequential C2H2-ZFs each contacting three or more sequential nucleotides. Additional architectures, e.g. as described in Paschon et al., Nat. Commun. 10, 1133 (2019), are also possible.

[0061] A ZFP domain of an epigenetic editor described herein may include 2, 3, 4, 5, 6, 7, 8, 9, 10, 11, 12, or more ZFs. The ZFP domain may include an array of two-finger or three-finger units, e.g., 3, 4, 5, 6, 7, 8, 9 or 10 or more units, wherein each unit binds a subsite in the target sequence. In some embodiments, a ZFP domain comprising at least three ZFs recognizes a target DNA sequence of 9 or 10 nucleotides. In some embodiments, a ZFP domain comprising at least four ZFs recognizes a target DNA sequence of 12 to 14 nucleotides. In some embodiments, a ZFP domain comprising at least six ZFs recognizes a target DNA sequence of 18 to 21 nucleotides.

[0062] In some embodiments, ZFs in a ZFP domain described herein are connected via peptide linkers. The peptide linkers may be, e.g., 2, 3, 4, 5, 6, 7, 8, 9, 10, 11, 12, 13, 14, 15, 16, 17, 18, 19, 20, or more amino acids in length. In some embodiments, a linker comprises 5 or more amino acids. In some embodiments, a linker comprises 7-17 amino acids. The linker may be flexible or rigid.

[0063] In some embodiments a zinc finger array may have the sequence:

(SEQ ID NOS: 1084 and 1250-1251, respectively,
in order of appearance)
SRPGERPFQCRICMRNFSXXXXXXXHXXTHTGEKPFQCRICMRNFSX
XXXXXXHXXTH[linker]FQCRICMRNFSXXXXXXXHXXTHTGEKP
FQCRICMRNFSXXXXXXXHXXTH[linker]PFQCRICMRNFSXXXX
XXXHXXTHTGEKPFQCRICMRNFSXXXXXXXHXXTHLRGS,

or a sequence at least 70%, 75%, 80%, 85%, 90%, 95%, 96%, 97%, 98%, or 99% identical thereto, where “XXXXXXX” represents the amino acids of the ZF recognition helix, which confers DNA-binding specificity upon the zinc finger; each X may be independently chosen. In the above sequence, “XX” in italics may be TR, LR or LK, and “[linked]” represents a linker sequence. In some embodiments, the linker sequence is TGSQKP (SEQ ID NO: 1085); this linker may be used when sub-sites targeted by the ZFs are adjacent. In some embodiments, the linker sequence is TGGGGSQKP (SEQ ID NO: 1086); this linker may be used when there is a base between the sub-sites targeted by the zinc fingers. The two indicated linkers may be the same or different.

[0064] ZFP domains herein may contain arrays of two or more adjacent ZFs that are directly adjacent to one another (e.g., separated by a short (canonical) linker sequence), or are separated by longer, flexible or structured polypeptide sequences. In some embodiments, directly adjacent fingers bind to contiguous nucleic acid sequences, i.e., to adjacent trinucleotides/triplets. In some embodiments, adjacent fingers cross-bind between each other's respective target triplets, which may help to strengthen or enhance the recognition of the target sequence, and leads to the binding of overlapping sequences. In some embodiments, distant ZFs within the ZFP domain may recognize (or bind to) non-contiguous nucleotide sequences.

[0065] The amino acid sequences of the ZF DNA-recognition helices of exemplary ZFP domains herein, and their HBV target sequences, are shown below in Table 1.

TABLE 1
Zinc finger transcriptional repressors for silencing HBV. ZF sequences of
exemplary ZFP domains are presented. SEQ ID Nos for target sequences and ZF
can be found in Table 20 sequence listing.

| | SEQ | Target | | | | | | | | | |
|---|---|---|---|---|---|---|---|---|---|---|---|
| ZFP | ID | Sequence | Start | End | Strd | F1 | F2 | F3 | F4 | F5 | F6 |
| ZFP894 | 33 | GATGAGGC | 415 | 432 | − | KKFN | RQDN | RSHN | QSTT | RNTN | IKHN |
| | | ATAGCAGC | | | | LLQ | LNS | LKL | LKR | LTR | LAR |
| | | AG (SEQ | | | | (SEQ | (SEQ | (SEQ | (SEQ | (SEQ | (SEQ |
| | | ID NO: | | | | ID | ID | ID | ID | ID | ID |
| | | 102) | | | | NO: | NO: | NO: | NO: | NO: | NO: |
| | | | | | | 125) | 156) | 189) | 222) | 257) | 297) |
| ZFP895 | 34 | GATGAGGC | 415 | 432 | − | KKFN | RKDY | RSHN | QSTT | RQDN | VVNN |
| | | ATAGCAGC | | | | LLQ | LIS | LKL | LKR | LGR | LNR |
| | | AG (SEQ | | | | (SEQ | (SEQ | (SEQ | (SEQ | (SEQ | (SEQ |
| | | ID NO: | | | | ID | ID | ID | ID | ID | ID |
| | | 102) | | | | NO: | NO: | NO: | NO: | NO: | NO: |
| | | | | | | 125) | 157) | 189) | 222) | 258) | 298) |
| ZFP896 | 35 | GATGAGGC | 415 | 432 | − | KKFN | RKDY | RSHN | QSTT | RQDN | VVNN |
| | | ATAGCAGC | | | | LLQ | LIS | LRL | LKR | LGR | LNR |
| | | AG (SEQ | | | | (SEQ | (SEQ | (SEQ | (SEQ | (SEQ | (SEQ |
| | | ID NO: | | | | ID | ID | ID | ID | ID | ID |
| | | 102) | | | | NO: | NO: | NO: | NO: | NO: | NO: |
| | | | | | | 125) | 157) | 190) | 222) | 258) | 298) |
| ZFP899 | 36 | GATGATTA | 1828 | 1845 | − | RRHI | RQDN | QSTT | RRDG | VHHN | ISHN |
| | | GGCAGAGG | | | | LDR | LGR | LKR | LAG | LVR | LAR |
| | | TG (SEQ | | | | (SEQ | (SEQ | (SEQ | (SEQ | (SEQ | (SEQ |
| | | ID NO: | | | | ID | ID | ID | ID | ID | ID |
| | | 103) | | | | NO: | NO: | NO: | NO: | NO: | NO: |
| | | | | | | 126) | 158) | 191) | 223) | 259) | 299) |
| ZFP900 | 37 | GATGATTA | 1828 | 1845 | − | RREV | RRDN | QSTT | RRDG | VHHN | ISHN |
| | | GGCAGAGG | | | | LEN | LNR | LKR | LAG | LVR | LAR |
| | | TG (SEQ | | | | (SEQ | (SEQ | (SEQ | (SEQ | (SEQ | (SEQ |
| | | ID NO: | | | | ID | ID | ID | ID | ID | ID |
| | | 103) | | | | NO: | NO: | NO: | NO: | NO: | NO: |
| | | | | | | 127) | 159) | 191) | 223) | 259) | 299) |
| ZFP901 | 38 | GATGATTA | 1828 | 1845 | − | RRAV | RQDN | QSTT | RRDG | VHHN | ISHN |
| | | GGCAGAGG | | | | LDR | LGR | LKR | LAG | LVR | LAR |
| | | TG (SEQ | | | | (SEQ | (SEQ | (SEQ | (SEQ | (SEQ | (SEQ |
| | | ID NO: | | | | ID | ID | ID | ID | ID | ID |
| | | 103) | | | | NO: | NO: | NO: | NO: | NO: | NO: |
| | | | | | | 128) | 158) | 191) | 223) | 259) | 299) |
| ZFP902 | 39 | GGATTCAG | 1433 | 1450 | − | RQEH | EGGN | SDRR | SFQS | RPNH | QSPH |
| | | CGCCGACG | | | | LVR | LMR | DLD | YLE | LAI | LKR |
| | | GG (SEQ | | | | (SEQ | (SEQ | (SEQ | (SEQ | (SEQ | (SEQ |
| | | ID NO: | | | | ID | ID | ID | ID | ID | ID |
| | | 104) | | | | NO: | NO: | NO: | NO: | NO: | NO: |
| | | | | | | 129) | 160) | 192) | 224) | 260) | 300) |
| ZFP903 | 40 | GGATTCAG | 1433 | 1450 | − | RREH | DPSN | SDRR | SFQS | RPNH | QSPH |
| | | CGCCGACG | | | | LVR | LQR | DLD | YLE | LAI | LKR |
| | | GG (SEQ | | | | (SEQ | (SEQ | (SEQ | (SEQ | (SEQ | (SEQ |
| | | ID NO: | | | | ID | ID | ID | ID | ID | ID |
| | | 104) | | | | NO: | NO: | NO: | NO: | NO: | NO: |
| | | | | | | 130) | 161) | 192) | 224) | 260) | 300) |
| ZFP904 | 41 | GGATTCAG | 1433 | 1450 | − | RREH | DMGN | SDRR | SFQS | RPNH | QSPH |
| | | CGCCGACG | | | | LVR | LGR | DLD | YLE | LAI | LKR |
| | | GG (SEQ | | | | (SEQ | (SEQ | (SEQ | (SEQ | (SEQ | (SE |
| | | ID NO: | | | | ID | ID | ID | ID | ID | ID |
| | | 104) | | | | NO: | NO: | NO: | NO: | NO: | NO: |
| | | | | | | 130) | 162) | 192) | 224) | 260) | 300) |
| ZFP907 | 42 | GGCAGTAG | 90 | 108 | − | KKDH | QKEI | QSAH | ETGS | QSHS | ESGH |
| | | TCGGAACA | | | | LHR | LTR | LKR | LRR | LKS | LKR |
| | | GGG (SEQ | | | | (SEQ | (SEQ | (SEQ | (SEQ | (SEQ | (SEQ |
| | | ID NO: | | | | ID | ID | ID | ID | ID | ID |
| | | 105) | | | | NO: | NO: | NO: | NO: | NO: | NO: |
| | | | | | | 131) | 163) | 193) | 225) | 261) | 301) |
| ZFP908 | 43 | GGCAGTAG | 90 | 108 | − | KKDH | QKEI | QSAH | DRTP | QSHS | ESGH |
| | | TCGGAACA | | | | LHR | LTR | LKR | LNR | LKS | LKR |
| | | GGG (SEQ | | | | (SEQ | (SEQ | (SEQ | (SEQ | (SEQ | (SEQ |
| | | ID NO: | | | | ID | ID | ID | ID | ID | ID |
| | | 105) | | | | NO: | NO: | NO: | NO: | NO: | NO: |
| | | | | | | 131) | 163) | 193) | 226) | 261) | 301) |
| ZFP909 | 44 | GGCAGTAG | 90 | 108 | − | KTDH | QKEI | QSAH | ETGS | QKHH | ENSK |
| | | TCGGAACA | | | | LAR | LTR | LKR | LRR | LVT | LRR |
| | | GGG (SEQ | | | | (SEQ | (SEQ | (SEQ | (SEQ | (SEQ | (SEQ |
| | | ID NO: | | | | ID | ID | ID | ID | ID | ID |
| | | 105) | | | | NO: | NO: | NO: | NO: | NO: | NO: |
| | | | | | | 132) | 163) | 193) | 225) | 262) | 302) |
| ZFP912 | 45 | GTAAACTG | 664 | 682 | − | QAGN | QNSH | DLST | QNEH | GGTA | QRSS |
| | | AGCCAGGA | | | | LVR | LRR | LRR | LKV | LRM | LVR |
| | | GAA (SEQ | | | | (SEQ | (SEQ | (SEQ | (SEQ | (SEQ | (SEQ |
| | | ID NO: | | | | ID | ID | ID | ID | ID | ID |
| | | 106) | | | | NO: | NO: | NO: | NO: | NO: | NO: |
| | | | | | | 133) | 164) | 194) | 227) | 263) | 303) |
| ZFP913 | 46 | GTAAACTG | 664 | 682 | − | QRGN | QTTH | DGST | QKTH | GGTA | QRSS |
| | | AGCCAGGA | | | | LOR | LSR | LRR | LAV | LRM | LVR |
| | | GAA (SEQ | | | | (SEQ | (SEQ | (SEQ | (SEQ | (SEQ | (SEQ |
| | | ID NO: | | | | ID | ID | ID | ID | ID | ID |
| | | 106) | | | | NO: | NO: | NO: | NO: | NO: | NO: |
| | | | | | | 134) | 165) | 195) | 228) | 263) | 303) |
| ZFP914 | 47 | GTAAACTG | 664 | 682 | − | QRGN | QTTH | DLST | QNEH | GGSA | QRSS |
| | | AGCCAGGA | | | | LQR | LSR | LRR | LKV | LSM | LVR |
| | | GAA (SEQ | | | | (SEQ | (SEQ | (SEQ | (SEQ | (SEQ | (SEQ |
| | | ID NO: | | | | ID | ID | ID | ID | ID | ID |
| | | 106) | | | | NO: | NO: | NO: | NO: | NO: | NO: |
| | | | | | | 134) | 165) | 194) | 227) | 264) | 303) |
| ZFP930 | 48 | ACGGTGGT | 1605 | 1623 | − | DRGN | QARS | EKAS | DHSS | RRFI | RNDS |
| | | CTCCATGC | | | | LTR | LRA | LIK | LKR | LSR | LKC |
| | | GAC (SEQ | | | | (SEQ | (SEQ | (SEQ | (SEQ | (SEQ | (SEQ |
| | | ID NO: | | | | ID | ID | ID | ID | ID | ID |
| | | 107) | | | | NO: | NO: | NO: | NO: | NO: | NO: |
| | | | | | | 135) | 166) | 196) | 229) | 265) | 304) |
| ZFP931 | 49 | ACGGTGGT | 1605 | 1623 | − | DRGN | QARS | DKSS | DHSS | RNFI | RNDT |
| | | CTCCATGC | | | | LTR | LRA | LRK | LKR | LQR | LII |
| | | GAC (SEQ | | | | (SEQ | (SEQ | (SEQ | (SEQ | (SEQ | (SEQ |
| | | ID NO: | | | | ID | ID | ID | ID | ID | ID |
| | | 107) | | | | NO: | NO: | NO: | NO: | NO: | NO: |
| | | | | | | 135) | 166) | 197) | 229) | 266) | 305) |
| ZFP932 | 50 | ACGGTGGT | 1605 | 1623 | − | DRGN | QARS | CNGS | DHSS | RNFI | RNDT |
| | | CTCCATGC | | | | LTR | LRA | LKK | LKR | LQR | LII |
| | | GAC (SEQ | | | | (SEQ | (SEQ | (SEQ | (SEQ | (SEQ | (SEQ |
| | | ID NO: | | | | ID | ID | ID | ID | ID | ID |
| | | 107) | | | | NO: | NO: | NO: | NO: | NO: | NO: |
| | | | | | | 135) | 166) | 198) | 229) | 266) | 305) |
| ZFP933 | 51 | GCTGGATG | 372 | 393 | + | RTDT | RTDS | DHSS | QPHG | QSAH | VGNS |
| | | TGTCTGCG | | | | LAR | LPR | LKR | LAH | LKR | LSR |
| | | GCG (SEQ | | | | (SEQ | (SEQ | (SEQ | (SEQ | (SEQ | (SEQ |
| | | ID NO: | | | | ID | ID | ID | ID | ID | ID |
| | | 108) | | | | NO: | NO: | NO: | NO: | NO: | NO: |
| | | | | | | 136) | 167) | 199) | 230) | 267) | 306) |
| ZFP934 | 52 | GCTGGATG | 372 | 393 | + | RTDT | RTDS | DHSS | QPHG | QSAH | VGNS |
| | | TGTCTGCG | | | | LAR | LPR | LKR | LRH | LKR | LSR |
| | | GCG (SEQ | | | | (SEQ | (SEQ | (SEQ | (SEQ | (SEQ | (SEQ |
| | | ID NO: | | | | ID | ID | ID | ID | ID | ID |
| | | 108) | | | | NO: | NO: | NO: | NO: | NO: | NO: |
| | | | | | | 136) | 167) | 199) | 231) | 267) | 306) |
| ZFP935 | 53 | GCTGGATG | 372 | 393 | + | RTDT | RLDM | DHSS | QPHG | QQAH | VHES |
| | | TGTCTGCG | | | | LAR | LAR | LKR | LST | LVR | LKR |
| | | GCG (SEQ | | | | (SEQ | (SEQ | (SEQ | (SEQ | (SEQ | (SEQ |
| | | ID NO: | | | | ID | ID | ID | ID | ID | ID |
| | | 108) | | | | NO: | NO: | NO: | NO: | NO: | NO: |
| | | | | | | 136) | 168) | 199) | 232) | 268) | 307) |
| ZFP938 | 54 | GTCTGCGA | 2381 | 2398 | − | RADN | RNTH | RGDG | RRDN | RARN | DPSS |
| | | GGCGAGGG | | | | LGR | LSY | LRR | LNR | LTL | LKR |
| | | AG (SEQ | | | | (SEQ | (SEQ | (SEQ | (SEQ | (SEQ | (SEQ |
| | | ID NO: | | | | ID | ID | ID | ID | ID | ID |
| | | 109) | | | | NO: | NO: | NO: | NO: | NO: | NO: |
| | | | | | | 137) | 169) | 200) | 233) | 269) | 308) |
| ZFP939 | 55 | GTCTGCGA | 2381 | 2398 | − | RADN | RNTH | RKLG | RQDN | RARN | DPSS |
| | | GGCGAGGG | | | | LGR | LSY | LLR | LGR | LTL | LKR |
| | | AG (SEQ | | | | (SEQ | (SEQ | (SEQ | (SEQ | (SEQ | (SEQ |
| | | ID NO: | | | | ID | ID | ID | ID | ID | ID |
| | | 109) | | | | NO: | NO: | NO: | NO: | NO: | NO: |
| | | | | | | 137) | 169) | 201) | 234) | 269) | 308) |
| ZFP940 | 56 | GTCTGCGA | 2381 | 2398 | − | RADN | RNTH | RKLG | RQDN | RRRN | DHSS |
| | | GGCGAGGG | | | | LGR | LSY | LLR | LGR | LQL | LKR |
| | | AG (SEQ | | | | (SEQ | (SEQ | (SEQ | (SEQ | (SEQ | (SEQ |
| | | ID NO: | | | | ID | ID | ID | ID | ID | ID |
| | | 109) | | | | NO: | NO: | NO: | NO: | NO: | NO: |
| | | | | | | 137) | 169) | 201) | 234) | 270) | 309) |
| ZFP943 | 57 | GTTGCCGG | 1146 | 1164 | − | QQSS | RREH | GLTA | ERAK | AKRD | VNSS |
| | | GCAACGGG | | | | LLR | LVR | LRT | LIR | LDR | LTR |
| | | GTA (SEQ | | | | (SEQ | (SEQ | (SEQ | (SEQ | (SEQ | (SEQ |
| | | ID NO: | | | | ID | ID | ID | ID | ID | ID |
| | | 110) | | | | NO: | NO: | NO: | NO: | NO: | NO: |
| | | | | | | 138) | 170) | 202) | 235) | 271) | 310) |
| ZFP944 | 58 | GTTGCCGG | 1146 | 1164 | − | QQSS | RREH | GLTA | ERAK | LRKD | VRHS |
| | | GCAACGGG | | | | LLR | LVR | LRT | LIR | LVR | LTR |
| | | GTA (SEQ | | | | (SEQ | (SEQ | (SEQ | (SEQ | (SEQ | (SEQ |
| | | ID NO: | | | | ID | ID | ID | ID | ID | ID |
| | | 110) | | | | NO: | NO: | NO: | NO: | NO: | NO: |
| | | | | | | 138) | 170) | 202) | 235) | 272) | 311) |
| ZFP945 | 59 | GTTGCCGG | 1146 | 1164 | − | QASA | RREH | GLTA | ERAK | AKRD | VNSS |
| | | GCAACGGG | | | | LSR | LVR | LRT | LIR | LDR | LTR |
| | | GTA (SEQ | | | | (SEQ | (SEQ | (SEQ | (SEQ | (SEQ | (SEQ |
| | | ID NO: | | | | ID | ID | ID | ID | ID | ID |
| | | 110) | | | | NO: | NO: | NO: | NO: | NO: | NO: |
| | | | | | | 139) | 170) | 202) | 235) | 271) | 310) |
| ZFP951 | 60 | CGAGAAAG | 1085 | 1103 | − | RGRN | DSSV | QNAN | QKHH | QRSN | QKVH |
| | | TGAAAGCC | | | | LEM | LRR | LKR | LAV | LAR | LEA |
| | | TGC (SEQ | | | | (SEQ | (SEQ | (SEQ | (SEQ | (SEQ | (SEQ |
| | | ID NO: | | | | ID | ID | ID | ID | ID | ID |
| | | 111) | | | | NO: | NO: | NO: | NO: | NO: | NO: |
| | | | | | | 140) | 171) | 203) | 236) | 273) | 312) |
| ZFP952 | 61 | CGAGAAAG | 1085 | 1103 | − | RRRN | DSSV | QNAN | QKHH | QRSN | QKVH |
| | | TGAAAGCC | | | | LDV | LRR | LKR | LAV | LAR | LEA |
| | | TGC (SEQ | | | | (SEQ | (SEQ | (SEQ | (SEQ | (SEQ | (SEQ |
| | | ID NO: | | | | ID | ID | ID | ID | ID | ID |
| | | 111) | | | | NO: | NO: | NO: | NO: | NO: | NO: |
| | | | | | | 141) | 171) | 203) | 236) | 273) | 312) |
| ZFP953 | 62 | CGAGAAAG | 1085 | 1103 | − | RGRN | DSSV | LKSN | LKQH | LKTN | QKCH |
| | | TGAAAGCC | | | | LAI | LRR | LHR | LVV | LAR | LKA |
| | | TGC (SEQ | | | | (SEQ | (SEQ | (SEQ | (SEQ | (SEQ | (SEQ |
| | | ID NO: | | | | ID | ID | ID | ID | ID | ID |
| | | 111) | | | | NO: | NO: | NO: | NO: | NO: | NO: |
| | | | | | | 142) | 171) | 204) | 237) | 274) | 313) |
| ZFP956 | 63 | GAGGCTTG | 1856 | 1874 | − | DGSN | RIDN | QRRY | QQTN | QRSD | RGDN |
| | | AACAGTAG | | | | LRR | LDG | LVE | LAR | LTR | LNR |
| | | GAC (SEQ | | | | (SEQ | (SEQ | (SEQ | (SEQ | (SEQ | (SEQ |
| | | ID NO: | | | | ID | ID | ID | ID | ID | ID |
| | | 112) | | | | NO: | NO: | NO: | NO: | NO: | NO: |
| | | | | | | 143) | 172) | 205) | 238) | 275) | 314) |
| ZFP957 | 64 | GAGGCTTG | 1856 | 1874 | − | DPSN | RRDN | TTFN | QTQN | HKET | REDN |
| | | AACAGTAG | | | | LQR | LPK | LRV | LTR | LNR | LGR |
| | | GAC (SEQ | | | | (SEQ | (SEQ | (SEQ | (SEQ | (SEQ | (SEQ |
| | | ID NO: | | | | ID | ID | ID | ID | ID | ID |
| | | 112) | | | | NO: | NO: | NO: | NO: | NO: | NO: |
| | | | | | | 144) | 173) | 206) | 239) | 276) | 315) |
| ZFP958 | 65 | GAGGCTTG | 1856 | 1874 | − | DPSN | RRDN | QRRY | QQTN | QRSD | RGDN |
| | | AACAGTAG | | | | LQR | LPK | LVE | LAR | LTR | LNR |
| | | GAC (SEQ | | | | (SEQ | (SEQ | (SEQ | (SEQ | (SEQ | (SEQ |
| | | ID NO: | | | | ID | ID | ID | ID | ID | ID |
| | | 112) | | | | NO: | NO: | NO: | NO: | NO: | NO: |
| | | | | | | 144) | 173) | 205) | 238) | 275) | 314) |
| ZFP961 | 66 | GAGGTTGG | 312 | 329 | − | QQTN | ANRT | EEAN | RGEH | TNSS | RIDN |
| | | GGACTGCG | | | | LTR | LVH | LRR | LTR | LTR | LIR |
| | | AA (SEQ | | | | (SEQ | (SEQ | (SEQ | (SEQ | (SEQ | (SEQ |
| | | ID NO: | | | | ID | ID | ID | ID | ID | ID |
| | | 113) | | | | NO: | NO: | NO: | NO: | NO: | NO: |
| | | | | | | 145) | 174) | 207) | 240) | 277) | 316) |
| ZFP962 | 67 | GAGGTTGG | 312 | 329 | − | QQTN | ANRT | EEAN | RREH | MTSS | RQDN |
| | | GGACTGCG | | | | LTR | LVH | LRR | LVR | LRR | LGR |
| | | AA (SEQ | | | | (SEQ | (SEQ | (SEQ | (SEQ | (SEQ | (SEQ |
| | | ID NO: | | | | ID | ID | ID | ID | ID | ID |
| | | 113) | | | | NO: | NO: | NO: | NO: | NO: | NO: |
| | | | | | | 145) | 174) | 207) | 241) | 278) | 317) |
| ZFP963 | 68 | GAGGTTGG | 312 | 329 | − | QQTN | ANRT | EEAN | RGEH | MTSS | RQDN |
| | | GGACTGCG | | | | LTR | LVH | LRR | LTR | LRR | LGR |
| | | AA (SEQ | | | | (SEQ | (SEQ | (SEQ | (SEQ | (SEQ | (SEQ |
| | | ID NO: | | | | ID | ID | ID | ID | ID | ID |
| | | 113) | | | | NO: | NO: | NO: | NO: | NO: | NO: |
| | | | | | | 145) | 174) | 207) | 240) | 278) | 317) |
| ZFP964 | 69 | GATGATGT | 742 | 762 | + | RATH | RADV | QRSS | RKDA | VHHN | ISHN |
| | | GGTATTGG | | | | LTR | LKG | LVR | LHV | LVR | LAR |
| | | GG (SEQ | | | | (SEQ | (SEQ | (SEQ | (SEQ | (SEQ | (SEQ |
| | | ID NO: | | | | ID | ID | ID | ID | ID | ID |
| | | 114) | | | | NO: | NO: | NO: | NO: | NO: | NO: |
| | | | | | | 146) | 175) | 208) | 242) | 259) | 299) |
| ZFP965 | 70 | GATGATGT | 742 | 762 | + | RATH | RADV | QSSS | RKER | VRHN | ISHN |
| | | GGTATTGG | | | | LTR | LKG | LVR | LAT | LTR | LAR |
| | | GG (SEQ | | | | (SEQ | (SEQ | (SEQ | (SEQ | (SEQ | (SEQ |
| | | ID NO: | | | | ID | ID | ID | ID | ID | ID |
| | | 114) | | | | NO: | NO: | NO: | NO: | NO: | NO: |
| | | | | | | 146) | 175) | 209) | 243) | 279) | 299) |
| ZFP966 | 71 | GATGATGT | 742 | 762 | + | KKDH | RKES | QSSS | RKER | VHHN | ISHN |
| | | GGTATTGG | | | | LHR | LTV | LVR | LAT | LVR | LAR |
| | | GG (SEQ | | | | (SEQ | (SEQ | (SEQ | (SEQ | (SEQ | (SEQ |
| | | ID NO: | | | | ID | ID | ID | ID | ID | ID |
| | | 114) | | | | NO: | NO: | NO: | NO: | NO: | NO: |
| | | | | | | 131) | 176) | 209) | 243) | 259) | 299) |
| ZFP969 | 72 | GATGATGT | 742 | 763 | + | RVDH | RREH | QSSS | RKER | VAHN | ISHN |
| | | GGTATTGG | | | | LHR | LSG | LVR | LAT | LTR | LAR |
| | | GGG (SEQ | | | | (SEQ | (SEQ | (SEQ | (SEQ | (SEQ | (SEQ |
| | | ID NO: | | | | ID | ID | ID | ID | ID | ID |
| | | 115) | | | | NO: | NO: | NO: | NO: | NO: | NO: |
| | | | | | | 147) | 177) | 209) | 243) | 280) | 299) |
| ZFP970 | 73 | GATGATGT | 742 | 763 | + | RKHH | RREH | QSSS | RKER | VAHN | ISHN |
| | | GGTATTGG | | | | LGR | LTI | LVR | LAT | LTR | LAR |
| | | GGG (SEQ | | | | (SEQ | (SEQ | (SEQ | (SEQ | (SEQ | (SEQ |
| | | ID NO: | | | | ID | ID | ID | ID | ID | ID |
| | | 115) | | | | NO: | NO: | NO: | NO: | NO: | NO: |
| | | | | | | 148) | 178) | 209) | 243) | 280) | 299) |
| ZFP971 | 74 | GATGATGT | 742 | 763 | + | RVDH | RSDH | QSSS | RKER | VAHN | ISHN |
| | | GGTATTGG | | | | LHR | LSL | LVR | LAT | LTR | LAR |
| | | GGG (SEQ | | | | (SEQ | (SEQ | (SEQ | (SEQ | (SEQ | (SEQ |
| | | ID NO: | | | | ID | ID | ID | ID | ID | ID |
| | | 115) | | | | NO: | NO: | NO: | NO: | NO: | NO: |
| | | | | | | 147) | 179) | 209) | 243) | 280) | 299) |
| ZFP984 | 75 | GCAGTAGT | 90 | 107 | − | KTDH | QKEI | QSAH | ETGS | QSSS | QTNT |
| | | CGGAACAG | | | | LAR | LTR | LKR | LRR | LVR | LGR |
| | | GG (SEQ | | | | (SEQ | (SEQ | (SEQ | (SEQ | (SEQ | (SEQ |
| | | ID NO: | | | | ID | ID | ID | ID | ID | ID |
| | | 116) | | | | NO: | NO: | NO: | NO: | NO: | NO: |
| | | | | | | 132) | 163) | 193) | 225) | 281) | 318) |
| ZFP985 | 76 | GCAGTAGT | 90 | 107 | − | KKDH | QKEI | QSAH | ETGS | QSSS | QGGT |
| | | CGGAACAG | | | | LHR | LTR | LKR | LRR | LVR | LRR |
| | | GG (SEQ | | | | (SEQ | (SEQ | (SEQ | (SEQ | (SEQ | (SEQ |
| | | ID NO: | | | | ID | ID | ID | ID | ID | ID |
| | | 116) | | | | NO: | NO: | NO: | NO: | NO: | NO: |
| | | | | | | 131) | 163) | 193) | 225) | 281) | 319) |
| ZFP986 | 77 | GCAGTAGT | 90 | 107 | − | KKDH | QKEI | QSAH | DPTS | QSSS | QTNT |
| | | CGGAACAG | | | | LHR | LTR | LKR | LNR | LVR | LGR |
| | | GG (SEQ | | | | (SEQ | (SE | (SEQ | (SEQ | (SEQ | (SEQ |
| | | ID NO: | | | | ID | ID | ID | ID | ID | ID |
| | | 116) | | | | NO: | NO: | NO: | NO: | NO: | NO: |
| | | | | | | 131) | 163) | 193) | 244) | 281) | 318) |
| ZFP989 | 78 | GCATAGCA | 409 | 426 | − | QQTN | VGGN | KRYN | RQDN | RSHN | QSTT |
| | | GCAGGATG | | | | LTR | LAR | LYQ | LNT | LKL | LKR |
| | | AA (SEQ | | | | (SEQ | (SEQ | (SEQ | (SEQ | (SEQ | (SEQ |
| | | ID NO: | | | | ID | ID | ID | ID | ID | ID |
| | | 117) | | | | NO: | NO: | NO: | NO: | NO: | NO: |
| | | | | | | 145) | 180) | 210) | 245) | 282) | 320) |
| ZFP990 | 79 | GCATAGCA | 409 | 426 | − | QQTN | VGGN | KRYN | RQDN | RSHN | QSTT |
| | | GCAGGATG | | | | LTR | LSR | LYQ | LNT | LRL | LKR |
| | | AA (SEQ | | | | (SEQ | (SEQ | (SEQ | (SEQ | (SEQ | (SEQ |
| | | ID NO: | | | | ID | ID | ID | ID | ID | ID |
| | | 117) | | | | NO: | NO: | NO: | NO: | NO: | NO: |
| | | | | | | 145) | 181) | 210) | 245) | 283) | 320) |
| ZFP991 | 80 | GCATAGCA | 409 | 426 | − | QQTN | VGGN | KKFN | RRDN | RSHN | QSTT |
| | | GCAGGATG | | | | LTR | LSR | LLQ | LKS | LKL | LKR |
| | | AA (SEQ | | | | (SEQ | (SEQ | (SEQ | (SEQ | (SEQ | (SEQ |
| | | ID NO: | | | | ID | ID | ID | ID | ID | ID |
| | | 117) | | | | NO: | NO: | NO: | NO: | NO: | NO: |
| | | | | | | 145) | 181) | 211) | 246) | 282) | 320) |
| ZFP994 | 81 | GGCGTTCA | 1612 | 1630 | − | DKSS | DHSS | RNFI | RNDT | TSTL | LKEH |
| | | CGGTGGTC | | | | LRK | LKR | LQR | LII | LKR | LTR |
| | | TCC (SEQ | | | | (SEQ | (SEQ | (SEQ | (SEQ | (SEQ | (SEQ |
| | | ID NO: | | | | ID | ID | ID | ID | ID | ID |
| | | 118) | | | | NO: | NO: | NO: | NO: | NO: | NO: |
| | | | | | | 149) | 182) | 212) | 247) | 284) | 321) |
| ZFP995 | 82 | GGCGTTCA | 1612 | 1630 | − | CNGS | DHSS | RNFI | RQDI | HKSS | ESGH |
| | | CGGTGGTC | | | | LKK | LKR | LAR | LVV | LTR | LKR |
| | | TCC (SEQ | | | | (SEQ | (SEQ | (SEQ | (SEQ | (SEQ | (SEQ |
| | | ID NO: | | | | ID | ID | ID | ID | ID | ID |
| | | 118) | | | | NO: | NO: | NO: | NO: | NO: | NO: |
| | | | | | | 150) | 182) | 213) | 248) | 285) | 301) |
| ZFP996 | 83 | GGCGTTCA | 1612 | 1630 | − | CNGS | DHSS | RNFI | RQDI | TSTL | LKEH |
| | | CGGTGGTC | | | | LKK | LKR | LAR | LVV | LKR | LTR |
| | | TCC (SEQ | | | | (SEQ | (SEQ | (SEQ | (SEQ | (SEQ | (SEQ |
| | | ID NO: | | | | ID | ID | ID | ID | ID | ID |
| | | 118) | | | | NO: | NO: | NO: | NO: | NO: | NO: |
| | | | | | | 150) | 182) | 213) | 248) | 284) | 321) |
| ZFP999 | 84 | GTTGGTGA | 327 | 344 | − | TNNN | RTDS | QREH | RRDN | RRQK | HKSS |
| | | GTGATTGG | | | | LAR | LTL | LTT | LNR | LTI | LTR |
| | | AG (SEQ | | | | (SEQ | (SEQ | (SEQ | (SEQ | (SEQ | (SEQ |
| | | ID NO: | | | | ID | ID | ID | ID | ID | ID |
| | | 119) | | | | NO: | NO: | NO: | NO: | NO: | NO: |
| | | | | | | 151) | 183) | 214) | 233) | 286) | 322) |
| ZFP1000 | 85 | GTTGGTGA | 327 | 344 | − | TNNN | RTDS | QREH | RGDN | RRQK | HKSS |
| | | GTGATTGG | | | | LAR | LTL | LTT | LKR | LTI | LTR |
| | | AG (SEQ | | | | (SEQ | (SEQ | (SEQ | (SEQ | (SEQ | (SEQ |
| | | ID NO: | | | | ID | ID | ID | ID | ID | ID |
| | | 119) | | | | NO: | NO: | NO: | NO: | NO: | NO: |
| | | | | | | 151) | 183) | 214) | 249) | 286) | 322) |
| ZFP1001 | 86 | GTTGGTGA | 327 | 344 | − | TNNN | RTDS | QREH | RGDN | RRQK | HKSS |
| | | GTGATTGG | | | | LAR | LTL | LNG | LAR | LTI | LTR |
| | | AG (SEQ | | | | (SEQ | (SEQ | (SEQ | (SEQ | (SEQ | (SEQ |
| | | ID NO: | | | | ID | ID | ID | ID | ID | ID |
| | | 119) | | | | NO: | NO: | NO: | NO: | NO: | NO: |
| | | | | | | 151) | 183) | 215) | 250) | 286) | 322) |
| ZFP1005 | 87 | GGAGGTTG | 312 | 330 | − | QQTN | ANRT | DPAN | RQEH | MKHH | QNSH |
| | | GGGACTGC | | | | LTR | LVH | LRR | LVR | LGR | LRR |
| | | GAA (SEQ | | | | (SEQ | (SEQ | (SEQ | (SEQ | (SEQ | (SEQ |
| | | ID NO: | | | | ID | ID | ID | ID | ID | ID |
| | | 120) | | | | NO: | NO: | NO: | NO: | NO: | NO: |
| | | | | | | 145) | 174) | 216) | 251) | 287) | 323) |
| ZFP1006 | 88 | GGAGGTTG | 312 | 330 | − | QQTN | ANRT | EEAN | RREH | MKHH | QNSH |
| | | GGGACTGC | | | | LTR | LVH | LRR | LVR | LGR | LRR |
| | | GAA (SEQ | | | | (SEQ | (SEQ | (SEQ | (SEQ | (SEQ | (SEQ |
| | | ID NO: | | | | ID | ID | ID | ID | ID | ID |
| | | 120) | | | | NO: | NO: | NO: | NO: | NO: | NO: |
| | | | | | | 145) | 174) | 207) | 241) | 287) | 323) |
| ZFP1007 | 89 | GGAGGTTG | 312 | 330 | − | QQTN | ANRT | DPAN | RQEH | LKQH | QGGH |
| | | GGGACTGC | | | | LTR | LVH | LRR | LVR | LVR | LAR |
| | | GAA (SEQ | | | | (SEQ | (SEQ | (SEQ | (SEQ | (SEQ | (SEQ |
| | | ID NO: | | | | ID | ID | ID | ID | ID | ID |
| | | 120) | | | | NO: | NO: | NO: | NO: | NO: | NO: |
| | | | | | | 145) | 174) | 216) | 251) | 288) | 324) |
| ZFP1008 | 90 | GGATGATG | 741 | 762 | + | RNTH | RADV | QRSS | RKDA | QNEH | QNSH |
| | | TGGTATTG | | | | LAR | LKG | LVR | LHV | LKV | LRR |
| | | GGG (SEQ | | | | (SEQ | (SEQ | (SEQ | (SEQ | (SEQ | (SEQ |
| | | ID NO: | | | | ID | ID | ID | ID | ID | ID |
| | | 121) | | | | NO: | NO: | NO: | NO: | NO: | NO: |
| | | | | | | 152) | 175) | 208) | 242) | 289) | 323) |
| ZFP1009 | 91 | GGATGATG | 741 | 762 | + | RNTH | RADV | QSSS | RKER | QKTH | QGGH |
| | | TGGTATTG | | | | LAR | LKG | LVR | LAT | LAV | LKR |
| | | GGG (SEQ | | | | (SEQ | (SEQ | (SEQ | (SEQ | (SEQ | (SEQ |
| | | ID NO: | | | | ID | ID | ID | ID | ID | ID |
| | | 121) | | | | NO: | NO: | NO: | NO: | NO: | NO: |
| | | | | | | 152) | 175) | 209) | 243) | 290) | 325) |
| ZFP1010 | 92 | GGATGATG | 741 | 762 | + | RNTH | RADV | QSSS | RKER | QKTH | QNSH |
| | | TGGTATTG | | | | LAR | LKG | LVR | LAT | LAV | LRR |
| | | GGG (SEQ | | | | (SEQ | (SEQ | (SEQ | (SEQ | (SEQ | (SEQ |
| | | ID NO: | | | | ID | ID | ID | ID | ID | ID |
| | | 121) | | | | NO: | NO: | NO: | NO: | NO: | NO: |
| | | | | | | 152) | 175) | 209) | 243) | 290) | 323) |
| ZFP1013 | 93 | GGATGTGT | 375 | 395 | + | HKSS | ESGH | RRRN | DRSS | QPHS | QKPH |
| | | CTGCGGCG | | | | LTR | LKR | LTL | LKR | LAV | LSR |
| | | TT (SEQ | | | | (SEQ | (SEQ | (SEQ | (SEQ | (SEQ | (SEQ |
| | | ID NO: | | | | ID | ID | ID | ID | ID | ID |
| | | 122) | | | | NO: | NO: | NO: | NO: | NO: | NO: |
| | | | | | | 153) | 184) | 217) | 252) | 291) | 326) |
| ZFP1014 | 94 | GGATGTGT | 375 | 395 | + | HKSS | EGGH | RRRN | DHSS | RRQH | QSAH |
| | | CTGCGGCG | | | | LTR | LKR | LQL | LKR | LQY | LKR |
| | | TT (SEQ | | | | (SEQ | (SEQ | (SEQ | (SEQ | (SEQ | (SEQ |
| | | ID NO: | | | | ID | ID | ID | ID | ID | ID |
| | | 122) | | | | NO: | NO: | NO: | NO: | NO: | NO: |
| | | | | | | 153) | 185) | 218) | 229) | 292) | 327) |
| ZFP1015 | 95 | GGATGTGT | 375 | 395 | + | HKSS | EGGH | RRRN | DRSS | RRQH | QSAH |
| | | CTGCGGCG | | | | LTR | LKR | LTL | LKR | LQY | LKR |
| | | TT (SEQ | | | | (SEQ | (SEQ | (SEQ | (SEQ | (SEQ | (SEQ |
| | | ID NO: | | | | ID | ID | ID | ID | ID | ID |
| | | 122) | | | | NO: | NO: | NO: | NO: | NO: | NO: |
| | | | | | | 153) | 185) | 217) | 252) | 292) | 327) |
| ZFP1018 | 96 | GGGGGTTG | 1184 | 1202 | − | GHTA | QSGT | DHSS | AMRS | RRSR | RGEH |
| | | CGTCAGCA | | | | LRN | LHR | LKR | LMG | LVR | LTR |
| | | AAC (SEQ | | | | (SEQ | (SEQ | (SEQ | (SEQ | (SEQ | (SEQ |
| | | ID NO: | | | | ID | ID | ID | ID | ID | ID |
| | | 123) | | | | NO: | NO: | NO: | NO: | NO: | NO: |
| | | | | | | 154) | 186) | 199) | 253) | 293 | 328) |
| ZFP1019 | 97 | GGGGGTTG | 1184 | 1202 | − | GHTA | QSTT | DHSS | QQRS | EAHH | RTEH |
| | | CGTCAGCA | | | | LRN | LKR | LKR | LVG | LSR | LAR |
| | | AAC (SEQ | | | | (SEQ | (SEQ | (SEQ | (SEQ | (SEQ | (SEQ |
| | | ID NO: | | | | ID | ID | ID | ID | ID | ID |
| | | 123) | | | | NO: | NO: | NO: | NO: | NO: | NO: |
| | | | | | | 154) | 187) | 199) | 254) | 294) | 329) |
| ZFP1020 | 98 | GGGGGTTG | 1184 | 1202 | − | GHTA | QSTT | DHSS | AMRS | RQSR | RREH |
| | | CGTCAGCA | | | | LRN | LKR | LKR | LMG | LQR | LVR |
| | | AAC (SEQ | | | | (SEQ | (SEQ | (SEQ | (SEQ | (SEQ | (SEQ |
| | | ID NO: | | | | ID | ID | ID | ID | ID | ID |
| | | 123) | | | | NO: | NO: | NO: | NO: | NO: | NO: |
| | | | | | | 154) | 187) | 199) | 253) | 295) | 330) |
| ZFP1023 | 99 | GTTGTTAG | 2342 | 2363 | + | QGET | RADN | DKAN | DQGN | HRHV | TNSS |
| | | ACGACGAG | | | | LKR | LRR | LTR | LIR | LIN | LTR |
| | | GCA (SEQ | | | | (SEQ | (SEQ | (SEQ | (SEQ | (SEQ | (SEQ |
| | | ID NO: | | | | ID | ID | ID | ID | ID | ID |
| | | 124) | | | | NO: | NO: | NO: | NO: | NO: | NO: |
| | | | | | | 155) | 188 | 219) | 255) | 296 | 331) |
| ZFP1024 | 100 | GTTGTTAG | 2342 | 2363 | + | QGET | RADN | DSSN | DQGN | HKSS | IRTS |
| | | ACGACGAG | | | | LKR | LRR | LRR | LIR | LTR | LKR |
| | | GCA (SEQ | | | | (SEQ | (SEQ | (SEQ | SEQ | (SEQ | (SEQ |
| | | ID NO: | | | | ID | ID | ID | ID | ID | ID |
| | | 124) | | | | NO: | NO: | NO: | NO: | NO: | NO: |
| | | | | | | 155) | 188) | 220) | 255) | 285 | 332) |
| ZFP1025 | 101 | GTTGTTAG | 2342 | 2363 | + | QGET | RADN | EQGN | DGGN | HRHV | TNSS |
| | | ACGACGAG | | | | LKR | LRR | LLR | LGR | LIN | LTR |
| | | GCA (SEQ | | | | (SEQ | (SEQ | (SEQ | (SEQ | (SEQ | (SEQ |
| | | ID NO: | | | | ID | ID | ID | ID | ID | ID |
| | | 124) | | | | NO: | NO: | NO: | NO: | NO: | NO: |
| | | | | | | 155) | 188) | 221) | 256) | 296) | 331) |

[0066] In some embodiments, the ZFP domain of the present epigenetic editor binds to a target sequence provided herein. In further embodiments, the ZFP domain comprises, in order, the F1-F6 amino acid sequences of any one of the zinc finger proteins as shown in Table 1 and Table 20. The F1-F6 amino acid sequences may be placed within the ZF framework sequence of SEQ ID NOS: 1084 and 1250-1251, or within any other ZF framework known in the art.

[0067] C. TALEs

[0068] In some embodiments, the DNA-binding domain of an epigenetic editor described herein comprises a transcription activator-like effector (TALE) domain. The DNA-binding domain of a TALE comprises a highly conserved sequence of about 33-34 amino acids, with a repeat variable di-residue (RVD) at positions 12 and 13 that is central to the recognition of specific nucleotides. TALEs can be engineered to bind practically any desired DNA sequence. Methods for programming TALEs are known in the art. For example, such methods are described in Carroll et al., Genet Soc Amer. (2011) 188(4):773-82; Miller et al., Nat Biotechnol. (2007) 25(7):778-85; Christian et al., Genetics (2008) 186(2):757-61; Li et al., Nucl Acids Res. (2010) 39(1):359-72; and Moscou et al., Science (2009) 326(5959):1501.

[0069] D. Other DNA-Binding Domains

[0070] Other DNA-binding domains are contemplated for the epigenetic editors described herein. In some embodiments, the DNA-binding domain comprises an argonaute protein domain, e.g., from Natronobacterium gregoryi (NgAgo). NgAgo is a ssDNA-guided endonuclease that is guided to its target site by 5′ phosphorylated ssDNA (gDNA), where it produces double-strand breaks. In contrast to Cas9, the NgAgo-gDNA system does not require a protospacer-adjacent motif (PAM). Thus, using a nuclease inactive NgAgo (dNgAgo) can greatly expand the bases that may be targeted. The characterization and use of NgAgo have been described, e.g., in Gao et al., Nat Biotechnol. (2016) 34(7):768-73; Swarts et al., Nature (2014) 507(7491):258-61; and Swarts et al., Nucl Acids Res. (2015) 43(10):5120-9.

[0071] In some embodiments, the DNA-binding domain comprises an inactivated nuclease, for example, an inactivated meganuclease. Additional non-limiting examples of DNA-binding domains include tetracycline-controlled repressor (tetR) DNA-binding domains, leucine zippers, helix-loop-helix (HLH) domains, helix-turn-helix domains, β-sheet motifs, steroid receptor motifs, bZIP domains homeodomains, and AT-hooks.

[0072] II. Guide Polynucleotides

[0073] Epigenetic editors described herein that comprise a polynucleotide guided DNA-binding domain may also include a guide polynucleotide that is capable of forming a complex with the DNA-binding domain. The guide polynucleotide may comprise RNA, DNA, or a mixture of both. For example, where the polynucleotide guided DNA-binding domain is a CRISPR-associated protein domain, the guide polynucleotide may be a guide RNA (gRNA). A “guide RNA” or “gRNA” refers to a nucleic acid that is able to hybridize to a target sequence and direct binding of the CRISPR-Cas complex to the target sequence. Methods of using guide polynucleotide sequences with programmable DNA-binding proteins (e.g., CRISPR-associated protein domains) for site-specific DNA targeting (e.g., to modify a genome) are known in the art.

[0074] A guide polynucleotide sequence (e.g., a gRNA sequence) may comprises two parts: 1) a nucleotide sequence comprising a “targeting sequence” that is complementary to a target nucleic acid sequence (“target sequence”), e.g., to a nucleic acid sequence comprised in a genomic target site; and 2) a nucleotide sequence that binds a polynucleotide guided DNA-binding domain (e.g., a CRISPR-Cas protein domain). The nucleotide sequence in 1) may comprise a targeting sequence that is 100% complementary to a genomic nucleic acid sequence, e.g., a nucleic acid sequence comprised in a genomic target site, and thus may hybridize to the target nucleic acid sequence. The nucleotide sequence in 1) may be referred to as, e.g., a crispr RNA, or crRNA. The nucleotide sequence in 2) may be referred to as a scaffold sequence of a guide nucleic acid, e.g., a tracrRNA, or an activating region of a guide nucleic acid, and may comprise a stem-loop structure. Parts 1) and 2) as described above may be fused to form one single guide (e.g., a single guide RNA, or sgRNA), or may be on two separate nucleic acid molecules. In some embodiments, a guide polynucleotide comprises parts 1) and 2) connected by a linker. In some embodiments, a guide polynucleotide comprises parts 1) and 2) connected by a non-nucleic acid linker, for example, a peptide linker or a chemical linker.

[0075] Part 2 (the scaffold sequence) of a guide polynucleotide as described herein may be, for example, as described in Jinek et al., Science (2012) 337:816-21; U.S. Patent Publication 2016/0208288; or U.S. Patent Publication 2016/0200779. Variants of part 2) are also contemplated by the present disclosure. For example, the tetraloop and stem loop of a gRNA scaffold (tracrRNA) sequence may be modified to include RNA aptamers, which can be bound by specific protein domains. In some embodiments, such modified gRNAs can be used to facilitate the recruitment of repressive or activating domains fused to the protein-interacting RNA aptamers.

[0076] A gRNA as provided herein typically comprises a targeting domain and a binding domain. The targeting domain (also termed “targeting sequence”) may comprise a nucleic acid sequence that binds to a target site, e.g., to a genomic nucleic acid molecule within a cell. The target site may be a double-stranded DNA sequence comprising a PAM sequence as well as the target sequence, which is located on the same strand as, and directly adjacent to, the PAM sequence. The targeting domain of the gRNA may comprise an RNA sequence that corresponds to the target sequence, i.e., it resembles the sequence of the target domain, sometimes with one or more mismatches, but typically comprising an RNA sequence instead of a DNA sequence. The targeting domain of the gRNA thus may base pair (in full or partial complementarity) with the sequence of the double-stranded target site that is complementary to the target sequence, and thus with the strand complementary to the strand that comprises the PAM sequence. It will be understood that the targeting domain of the gRNA typically does not include a sequence that resembles the PAM sequence. It will further be understood that the location of the PAM may be 5′ or 3′ of the target sequence, depending on the nuclease employed. For example, the PAM is typically 3′ of the target sequence for Cas9 nucleases, and 5′ of the target sequence for Cas12a nucleases. For an illustration of the location of the PAM and the mechanism of gRNA binding to a target site, see, e.g., FIG. 1 of Vanegas et al., Fungal Biol Biotechnol. (2019) 6:6, which is incorporated by reference herein. For additional illustration and description of the mechanism of gRNA targeting of an RNA-guided nuclease to a target site, see Fu et al., Nat Biotechnol (2014) 32(3):279-84 and Sternberg et al., Nature (2014) 507(7490):62-7, each incorporated herein by reference.

[0077] In some embodiments, the targeting domain sequence comprises between 17 and 30 nucleotides and corresponds fully to the target sequence (i.e., without any mismatch nucleotides). In some embodiments, however, the targeting domain sequence may comprise one or more, but typically not more than 4, mismatches, e.g., 1, 2, 3, or 4 mismatches. As the targeting domain is part of gRNA, which is an RNA molecule, it will typically comprise ribonucleotides, while the DNA targeting domain will comprise deoxyribonucleotides.

[0078] An exemplary illustration of a Cas9 target site, comprising a 22 nucleotide target domain, and an NGG PAM sequence, as well as of a gRNA comprising a targeting domain that fully corresponds to the target sequence (and thus base pairs with full complementarity with the DNA strand complementary to the strand comprising the target sequence and PAM) is provided below:

[ target domain (DNA) ][ PAM ]
5′-N-N-N-N-N-N-N-N-N-N-N-N-N-N-N-N-N-N-N-N-N-N-N-G-G-3′ (DNA)
3′-N-N-N-N-N-N-N-N-N-N-N-N-N-N-N-N-N-N-N-N-N-N-N-C-C-5′ (DNA)
| | | | | | | | | | | | | | | | | | | | | |
5′-N-N-N-N-N-N-N-N-N-N-N-N-N-N-N-N-N-N-N-N-N-N-[ gRNA scaffold]-3′ (RNA)
[ targeting domain ( RNA) ][ binding domain ]

[0079] An exemplary illustration of a Cas12a target site, comprising a 22 nucleotide target domain, and a TTN PAM sequence, as well as of a gRNA comprising a targeting domain that fully corresponds to the target sequence (and thus base pairs with full complementarity with the DNA strand complementary to the strand comprising the target sequence and PAM) is provided below:

```
                    [ PAM ][ target domain ( DNA) ]
                    5′-T-T-N-N-N-N-N-N-N-N-N-N-N-N-N-N-N-N-N-N-N-N-N-N-N-3′ (DNA)
                    3′-A-A-N-N-N-N-N-N-N-N-N-N-N-N-N-N-N-N-N-N-N-N-N-N-N-5′ (DNA)
                                      | | | | | | | | | | | | | | | | | | | | | |
5′-[gRNA scaffold]-N-N-N-N-N-N-N-N-N-N-N-N-N-N-N-N-N-N-N-N-N-N-3′ (RNA)
[ binding domain ][ targeting domain ( RNA) ]
```

[0080] While not wishing to be bound by theory, at least in some embodiments, it is believed that the length and complementarity of the targeting domain with the target sequence contributes to specificity of the interaction of the gRNA/Cas9 molecule complex with a target nucleic acid. In some embodiments, the targeting domain of a gRNA provided herein is 5 to 50 nucleotides in length. In some embodiments, the targeting domain is 15 to 25 nucleotides in length. In some embodiments, the targeting domain is 18 to 22 nucleotides in length. In some embodiments, the targeting domain is 19-21 nucleotides in length. In some embodiments, the targeting domain is 15 nucleotides in length. In some embodiments, the targeting domain is 16 nucleotides in length. In some embodiments, the targeting domain is 17 nucleotides in length. In some embodiments, the targeting domain is 18 nucleotides in length. In some embodiments, the targeting domain is 19 nucleotides in length. In some embodiments, the targeting domain is 20 nucleotides in length. In some embodiments, the targeting domain is 21 nucleotides in length. In some embodiments, the targeting domain is 22 nucleotides in length. In some embodiments, the targeting domain is 23 nucleotides in length. In some embodiments, the targeting domain is 24 nucleotides in length. In some embodiments, the targeting domain is 25 nucleotides in length. In certain embodiments, the targeting domain fully corresponds, without mismatch, to a target sequence provided herein, or a part thereof. In some embodiments, the targeting domain of a gRNA provided herein comprises 1 mismatch relative to a target sequence provided herein. In some embodiments, the targetindg domain comprises 2 mismatches relative to the target sequence. In some embodiments, the target domain comprises 3 mismatches relative to the target sequence.

[0081] Methods for designing, selecting, and validating gRNAs are described herein and known in the art. Software tools can be used to optimize the gRNAs corresponding to a target DNA sequence, e.g., to minimize total off-target activity across the genome. For example, DNA sequence searching algorithms can be used to identify a target sequence in crRNAs of a gRNA for use with Cas9. Exemplary gRNA design tools include the ones described in Bae et al., Bioinformatics (2014) 30:1473-5.

[0082] Guide polynucleotides (e.g., gRNAs) described herein may be of various lengths. In some embodiments, the length of the spacer or targeting sequence depends on the CRISPR-associated protein component of the epigenetic editor system used. For example, Cas proteins from different bacterial species have varying optimal targeting sequence lengths. Accordingly, the spacer sequence may comprise, e.g., 5, 6, 7, 8, 9, 10, 11, 12, 13, 14, 15, 16, 17, 18, 19, 20, 21, 22, 23, 24, 25, 26, 27, 28, 29, 30, 31, 32, 33, 34, 35, 36, 37, 38, 39, 40, 41, 42, 43, 44, 45, 46, 47, 48, 49, 50, or more than 50 nucleotides in length. In some embodiments, the spacer comprises 10-24, 11-20, 11-16, 18-24, 19-21, or 20 nucleotides in length. In some embodiments, a guide polynucleotide (e.g., gRNA) is from 15-100 (e.g., 15, 16, 17, 18, 19, 20, 21, 22, 23, 24, 25, 26, 27, 28, 29, 30, 31, 32, 33, 34, 35, 36, 37, 38, 39, 40, 41, 42, 43, 44, 45, 46, 47, 48, 49, or 50) nucleotides in length and comprises a spacer sequence of at least 10 (e.g., 15, 16, 17, 18, 19, 20, 21, 22, 23, 24, 25, 26, 27, 28, 29, 30, 31, 32, 33, 34, 35, 36, 37, 38, 39, 40, 41, 42, 43, 44, 45, 46, 47, 48, 49, or 50) contiguous nucleotides complementary to the target sequence. In some embodiments, a guide polynucleotide described herein may be truncated, e.g., by 1, 2, 3, 4, 5, 10, 15, 20, 25, 30, 40, 50 or more nucleotides.

[0083] In certain embodiments, the 3′ end of the HBV target sequence is immediately adjacent to a PAM sequence (e.g., a canonical PAM sequence such as NGG for SpCas9). The degree of complementarity between the targeting sequence of the guide polynucleotide (e.g., the spacer sequence of a gRNA) and the target sequence may be at least 90%, 91%, 92%, 93%, 94%, 95%, 96%, 97%, 98%, 99%, or 100%. In particular embodiments, the targeting and the target sequence may be 100% complementary. In other embodiments, the targeting sequence and the target sequence may contain, e.g., 1, 2, 3, 4, 5, 6, 7, 8, 9, or 10 mismatches.

[0084] A guide polynucleotide (e.g., gRNA) may be modified with, for example, chemical alterations and synthetic modifications. A modified gRNA, for instance, can include an alteration or replacement of one or both of the non-linking phosphate oxygens and/or of one or more of the linking phosphate oxygens in the phosphodiester backbone linkage, an alteration of the ribose sugar (e.g., of the 2′ hydroxyl on the ribose sugar), an alteration of the phosphate moiety, modification or replacement of a naturally occurring nucleobase, modification or replacement of the ribose-phosphate backbone, modification of the 3′ end and/or 5′ end of the oligonucleotide, replacement of a terminal phosphate group or conjugation of a moiety, cap, or linker, or any combination thereof.

[0085] In some embodiments, one or more ribose groups of the gRNA may be modified. Examples of chemical modifications to the ribose group include, but are not limited to, 2′-O-methyl (2′-OMe), 2′-fluoro (2′-F), 2′-deoxy, 2′-O-(2-methoxyethyl) (2′-MOE), 2′—NH2, 2′-O-allyl, 2′-O-ethylamine, 2′-O-cyanoethyl, 2′-O-acetalester, or a bicyclic nucleotide such as locked nucleic acid (LNA), 2′-(5-constrained ethyl (S-cEt)), constrained MOE, or 2′-0,4′-C-aminomethylene bridged nucleic acid (2′,4′-BNANC). 2′-O-methyl modification and/or 2′-fluoro modification may increase binding affinity and/or nuclease stability of the gRNA oligonucleotides.

[0086] In some embodiments, one or more phosphate groups of the gRNA may be chemically modified. Examples of chemical modifications to a phosphate group include, but are not limited to, a phosphorothioate (PS), phosphonoacetate (PACE), thiophosphonoacetate (thioPACE), amide, triazole, phosphonate, and phosphotriester modification. In some embodiments, a guide polynucleotide described herein may comprise one, two, three, or more PS linkages at or near the 5′ end and/or the 3′ end; the PS linkages may be contiguous or noncontiguous.

[0087] In some embodiments, the gRNA herein comprises a mixture of ribonucleotides and deoxyribonucleotides and/or one or more PS linkages.

[0088] In some embodiments, one or more nucleobases of the gRNA may be chemically modified. Examples of chemically modified nucleobases include, but are not limited to, 2-thiouridine, 4-thiouridine, N6-methyladenosine, pseudouridine, 2,6-diaminopurine, inosine, thymidine, 5-methylcytosine, 5-substituted pyrimidine, isoguanine, isocytosine, and nucleobases with halogenated aromatic groups. Chemical modifications can be made in the spacer region, the tracr RNA region, the stem loop, or any combination thereof.

[0089] Table 2 below lists exemplary target sequences for epigenetic modification of HBV, as well as the coordinates of the start and end positions of the targeted site on the HBV genome.

TABLE 2
Targeting Domain Sequences of Exemplary gRNAs
Targeting HBV. The following target sites were
identified as suitable for targeting with an
epigenetic repressor:

| SEQ | | | | |
|---|---|---|---|---|
| IDs | Target domain sequence | Start | End | Strand |
| 333 | CCTGCTGGTGGCTCCAGTTC | 57 | 77 | + |
| 334 | CTGAACTGGAGCCACCAGCA | 59 | 79 | − |
| 335 | CCTGAACTGGAGCCACCAGC | 60 | 80 | − |
| 336 | CCTCGAGAAGATTGACGATA | 115 | 135 | − |
| 337 | TCGTCAATCTTCTCGAGGAT | 117 | 137 | + |
| 338 | CGTCAATCTTCTCGAGGATT | 118 | 138 | + |
| 339 | GTCAATCTTCTCGAGGATTG | 119 | 139 | + |
| 340 | AACATGGAGAACATCACATC | 153 | 173 | + |
| 341 | AACATCACATCAGGATTCCT | 162 | 182 | + |
| 342 | CTAGACTCTGCGGTATTGTG | 233 | 253 | − |
| 343 | TACCGCAGAGTCTAGACTCG | 238 | 258 | + |
| 344 | CGCAGAGTCTAGACTCGTGG | 241 | 261 | + |
| 345 | CACCACGAGTCTAGACTCTG | 243 | 263 | − |
| 346 | TGGACTTCTCTCAATTTTCT | 261 | 281 | + |
| 347 | GGACTTCTCTCAATTTTCTA | 262 | 282 | + |
| 348 | GACTTCTCTCAATTTTCTAG | 263 | 283 | + |
| 349 | ACTTCTCTCAATTTTCTAGG | 264 | 284 | + |
| 350 | CGAATTTTGGCCAAGACACA | 295 | 315 | − |
| 351 | AGGTTGGGGACTGCGAATTT | 309 | 328 | − |
| 352 | GGCATAGCAGCAGGATGAAG | 408 | 427 | − |
| 353 | AGAAGATGAGGCATAGCAGC | 417 | 436 | − |
| 354 | GCTATGCCTCATCTTCTTGT | 420 | 439 | + |
| 355 | GAAGAACCAACAAGAAGATG | 429 | 448 | − |
| 356 | CATCTTCTTGTTGGTTCTTC | 429 | 448 | + |
| 357 | CCCGTTTGTCCTCTAATTCC | 469 | 488 | + |
| 358 | CCTGGAATTAGAGGACAAAC | 472 | 491 | − |
| 359 | TCCTGGAATTAGAGGACAAA | 473 | 492 | − |
| 360 | TACTAGTGCCATTTGTTCAG | 680 | 699 | + |
| 361 | CCATTTGTTCAGTGGTTCGT | 688 | 707 | + |
| 362 | CATTTGTTCAGTGGTTCGTA | 689 | 708 | + |
| 363 | CCTACGAACCACTGAACAAA | 691 | 710 | − |
| 364 | TTTCAGTTATATGGATGATG | 731 | 750 | + |
| 365 | CAAAAGAAAATTGGTAACAG | 799 | 818 | − |
| 366 | TACCAATTTTCTTTTGTCTT | 803 | 822 | + |
| 367 | ACCAATTTTCTTTTGTCTTT | 804 | 823 | + |
| 368 | ACCCAAAGACAAAAGAAAAT | 808 | 827 | − |
| 369 | TGACATACTTTCCAATCAAT | 975 | 994 | − |
| 370 | CACTTTCTCGCCAACTTACA | 1093 | 1113 | + |
| 371 | CACAGAAAGGCCTTGTAAGT | 1106 | 1126 | − |
| 372 | TGAACCTTTACCCCGTTGCC | 1137 | 1157 | + |
| 373 | GGGCAACGGGGTAAAGGTTC | 1138 | 1158 | − |
| 374 | TTTACCCCGTTGCCCGGCAA | 1143 | 1163 | + |
| 375 | GTTGCCGGGCAACGGGGTAA | 1144 | 1164 | − |
| 376 | CCCGTTGCCCGGCAACGGCC | 1148 | 1168 | + |
| 377 | CTGGCCGTTGCCGGGCAACG | 1150 | 1170 | − |
| 378 | CCTGGCCGTTGCCGGGCAAC | 1151 | 1171 | − |
| 379 | ACCTGGCCGTTGCCGGGCAA | 1152 | 1172 | − |
| 380 | GCACAGACCTGGCCGTTGCC | 1158 | 1178 | − |
| 381 | GGCACAGACCTGGCCGTTGC | 1159 | 1179 | − |
| 382 | GCAAACACTTGGCACAGACC | 1169 | 1189 | − |
| 383 | GGGTTGCGTCAGCAAACACT | 1180 | 1200 | − |
| 384 | TTTGCTGACGCAACCCCCAC | 1184 | 1204 | + |
| 385 | CTGACGCAACCCCCACTGGC | 1188 | 1208 | + |
| 386 | TGACGCAACCCCCACTGGCT | 1189 | 1209 | + |
| 387 | GACGCAACCCCCACTGGCTG | 1190 | 1210 | + |
| 388 | AACCCCCACTGGCTGGGGCT | 1195 | 1215 | + |
| 389 | TCCTCTGCCGATCCATACTG | 1255 | 1275 | + |
| 390 | TCCGCAGTATGGATCGGCAG | 1259 | 1279 | − |
| 391 | AGGAGTTCCGCAGTATGGAT | 1265 | 1285 | − |
| 392 | CGGCTAGGAGTTCCGCAGTA | 1270 | 1290 | − |
| 393 | TGCGAGCAAAACAAGCGGCT | 1285 | 1305 | − |
| 394 | CCGCTTGTTTTGCTCGCAGC | 1287 | 1307 | + |
| 395 | CCTGCTGCGAGCAAAACAAG | 1290 | 1310 | − |
| 396 | TGTTTTGCTCGCAGCAGGTC | 1292 | 1312 | + |
| 397 | GCAGCACAGCCTAGCAGCCA | 1376 | 1396 | − |
| 398 | TGCTAGGCTGTGCTGCCAAC | 1380 | 1400 | + |
| 399 | GCTGCCAACTGGATCCTGCG | 1391 | 1411 | + |
| 400 | CTGCCAACTGGATCCTGCGC | 1392 | 1412 | + |
| 401 | CGTCCCGCGCAGGATCCAGT | 1398 | 1418 | − |
| 402 | AAACAAAGGACGTCCCGCGC | 1408 | 1428 | − |
| 403 | GTCCTTTGTTTACGTCCCGT | 1417 | 1437 | + |
| 404 | CGCCGACGGGACGTAAACAA | 1422 | 1442 | − |
| 405 | TGCCGTTCCGACCGACCACG | 1504 | 1523 | + |
| 406 | AGGTGCGCCCCGTGGTCGGT | 1513 | 1533 | − |
| 407 | AGAGAGGTGCGCCCCGTGGT | 1517 | 1537 | − |
| 408 | GTAAAGAGAGGTGCGCCCCG | 1521 | 1541 | − |
| 409 | GGGGCGCACCTCTCTTTACG | 1522 | 1542 | + |
| 410 | CGGGGAGTCCGCGTAAAGAG | 1533 | 1553 | − |
| 411 | CAGATGAGAAGGCACAGACG | 1551 | 1571 | − |
| 412 | GTCTGTGCCTTCTCATCTGC | 1552 | 1572 | + |
| 413 | GGCAGATGAGAAGGCACAGA | 1553 | 1573 | − |
| 414 | GCAGATGAGAAGGCACAGAC | 1553 | 1572 | − |
| 415 | ACACGGTCCGGCAGATGAGA | 1562 | 1582 | − |
| 416 | GAAGCGAAGTGCACACGGTC | 1574 | 1594 | − |
| 417 | GAGGTGAAGCGAAGTGCACA | 1579 | 1599 | − |
| 418 | CTTCACCTCTGCACGTCGCA | 1590 | 1610 | + |
| 419 | GGTCTCCATGCGACGTGCAG | 1598 | 1618 | − |
| 420 | TGCCCAAGGTCTTACATAAG | 1640 | 1660 | + |
| 421 | GTCCTCTTATGTAAGACCTT | 1645 | 1665 | − |
| 422 | AGTCCTCTTATGTAAGACCT | 1646 | 1666 | − |
| 423 | GTCTTACATAAGAGGACTCT | 1648 | 1668 | + |
| 424 | AATGTCAACGACCGACCTTG | 1680 | 1700 | + |
| 425 | TTTGAAGTATGCCTCAAGGT | 1694 | 1714 | − |
| 426 | AGTCTTTGAAGTATGCCTCA | 1698 | 1718 | − |
| 427 | AAGACTGTTTGTTTAAAGAC | 1712 | 1732 | + |
| 428 | AGACTGTTTGTTTAAAGACT | 1713 | 1733 | + |
| 429 | CTGTTTGTTTAAAGACTGGG | 1716 | 1736 | + |
| 430 | GTTTAAAGACTGGGAGGAGT | 1722 | 1742 | + |
| 431 | TCTTTGTACTAGGAGGCTGT | 1766 | 1786 | + |
| 432 | AGGAGGCTGTAGGCATAAAT | 1776 | 1796 | + |
| 433 | GTGAAAAAGTTGCATGGTGC | 1810 | 1830 | − |
| 434 | GCAGAGGTGAAAAAGTTGCA | 1816 | 1836 | − |
| 435 | AACAAGAGATGATTAGGCAG | 1832 | 1852 | − |
| 436 | GACATGAACAAGAGATGATT | 1838 | 1858 | − |
| 437 | AGCTTGGAGGCTTGAACAGT | 1860 | 1880 | − |
| 438 | CAAGCCTCCAAGCTGTGCCT | 1866 | 1886 | + |
| 439 | AAGCCTCCAAGCTGTGCCTT | 1867 | 1887 | + |
| 440 | CCTCCAAGCTGTGCCTTGGG | 1871 | 1890 | + |
| 441 | CCACCCAAGGCACAGCTTGG | 1873 | 1893 | − |
| 442 | AGCTGTGCCTTGGGTGGCTT | 1876 | 1896 | + |
| 443 | AAGCCACCCAAGGCACAGCT | 1876 | 1896 | − |
| 444 | GCTGTGCCTTGGGTGGCTTT | 1877 | 1897 | + |
| 445 | CTGTGCCTTGGGTGGCTTTG | 1878 | 1898 | + |
| 446 | TAGCTCCAAATTCTTTATAA | 1916 | 1936 | − |
| 447 | GTAGCTCCAAATTCTTTATA | 1917 | 1937 | − |
| 448 | TAAAGAATTTGGAGCTACTG | 1919 | 1939 | + |
| 449 | ATGACTCTAGCTACCTGGGT | 2097 | 2117 | + |
| 450 | CACATTTCTTGTCTCACTTT | 2211 | 2231 | + |
| 451 | TAGTTTCCGGAAGTGTTGAT | 2321 | 2341 | − |
| 452 | CGTCTAACAACAGTAGTTTC | 2334 | 2354 | − |
| 453 | ACTACTGTTGTTAGACGACG | 2337 | 2357 | + |
| 454 | CTGTTGTTAGACGACGAGGC | 2341 | 2361 | + |
| 455 | CGAGGGAGTTCTTCTTCTAG | 2368 | 2388 | − |
| 456 | GCGAGGGAGTTCTTCTTCTA | 2369 | 2389 | − |
| 457 | GGCGAGGGAGTTCTTCTTCT | 2370 | 2390 | − |
| 458 | CTCCCTCGCCTCGCAGACGA | 2380 | 2400 | + |
| 459 | GACCTTCGTCTGCGAGGCGA | 2385 | 2405 | − |
| 460 | AGACCTTCGTCTGCGAGGCG | 2386 | 2406 | − |
| 461 | GATTGAGACCTTCGTCTGCG | 2391 | 2411 | − |
| 462 | GATTGAGATCTTCTGCGACG | 2415 | 2435 | − |
| 463 | GTCGCAGAAGATCTCAATCT | 2416 | 2436 | + |
| 464 | TCGCAGAAGATCTCAATCTC | 2417 | 2437 | + |
| 465 | ATATGGTGACCCACAAAATG | 2807 | 2827 | − |
| 466 | TTTGTGGGTCACCATATTCT | 2810 | 2830 | + |
| 467 | TTGTGGGTCACCATATTCTT | 2811 | 2831 | + |
| 468 | GCTGGATCCAACTGGTGGTC | 2894 | 2914 | − |
| 469 | CACCCCAAAAGGCCTCCGTG | 3026 | 3046 | − |
| 470 | CCTTTTGGGGTGGAGCCCTC | 3034 | 3054 | + |
| 471 | CCTGAGGGCTCCACCCCAAA | 3037 | 3057 | − |
| 472 | GGGGTGGAGCCCTCAGGCTC | 3040 | 3060 | + |
| 473 | GGGTGGAGCCCTCAGGCTCA | 3041 | 3061 | + |
| 474 | CGATTGGTGGAGGCAGGAGG | 3092 | 3112 | − |
| 475 | CTCATCCTCAGGCCATGCAG | 3159 | 3179 | + |
| 102 | GATGAGGCATAGCAGCAG | 415 | 432 | − |
| 103 | GATGATTAGGCAGAGGTG | 1828 | 1845 | − |
| 104 | GGATTCAGCGCCGACGGG | 1433 | 1450 | − |
| 105 | GGCAGTAGTCGGAACAGGG | 90 | 108 | − |
| 106 | GTAAACTGAGCCAGGAGAA | 664 | 682 | − |
| 107 | ACGGTGGTCTCCATGCGAC | 1605 | 1623 | − |
| 108 | GCTGGATGTGTCTGCGGCG | 372 | 393 | + |
| 109 | GTCTGCGAGGCGAGGGAG | 2381 | 2398 | − |
| 110 | GTTGCCGGGCAACGGGGTA | 1146 | 1164 | − |
| 111 | CGAGAAAGTGAAAGCCTGC | 1085 | 1103 | − |
| 112 | GAGGCTTGAACAGTAGGAC | 1856 | 1874 | − |
| 113 | GAGGTTGGGGACTGCGAA | 312 | 329 | − |
| 114 | GATGATGTGGTATTGGGG | 742 | 762 | + |
| 115 | GATGATGTGGTATTGGGGG | 742 | 763 | + |
| 116 | GCAGTAGTCGGAACAGGG | 90 | 107 | − |
| 117 | GCATAGCAGCAGGATGAA | 409 | 426 | − |
| 118 | GGCGTTCACGGTGGTCTCC | 1612 | 1630 | − |
| 119 | GTTGGTGAGTGATTGGAG | 327 | 344 | − |
| 120 | GGAGGTTGGGGACTGCGAA | 312 | 330 | − |
| 121 | GGATGATGTGGTATTGGGG | 741 | 762 | + |
| 122 | GGATGTGTCTGCGGCGTT | 375 | 395 | + |
| 123 | GGGGGTTGCGTCAGCAAAC | 1184 | 1202 | − |
| 124 | GTTGTTAGACGACGAGGCA | 2342 | 2363 | + |

[0090] Target domains identified above that are adjacent to a PAM sequence, e.g., an S. pyogenes Cas9 PAM sequence, can be targeted by a CRISPR-based epigenetic repressor, e.g., an epigenetic repressor comprising a dCas9 DNA-binding domain. For example, target sites 1-143 are suitable for dCas9-based epigenetic repressor targeting.

[0091] A suitable gRNA for targeting any of the target domain sequences would, in some embodiments, comprise a target domain sequence that is the RNA-equivalent sequence of the provided DNA sequence of the targeting domain sequence (i.e., an RNA nucleotide of that sequence instead of the provided DNA nucleotide, with uracil instead of thymine), and a suitable tracr RNA sequence.

[0092] Any tracr sequence known in the art is contemplated for a gRNA described herein. In some embodiments, a gRNA described herein has a tracr sequence shown in Table 3 below, or a tracr sequence at least 70%, 75%, 80%, 85%, 90%, 95%, 96%, 97%, 98%, or 99% identical to the tracr sequence shown below (SEQ: SEQ ID NO).

TABLE 3
Exemplary TRACR Sequences

| SEQ | Sequence (5′ to 3′) |
|---|---|
| 1087 | GUUUAAGAGCUAUGCUGGAAACAGCAUAGCAAGUUUAAAUAAG |
| | GCUAGUCCGUUAUCAACUUGAAAAAGUGGCACCGAGUCGGUGC |
| | UUUUUUU |
| 1088 | GUUUUAGAGCUAGAAAUAGCAAGUUAAAAUAAGGCUAGUCCGU |
| | UAUCAACUUGAAAAAGUGGCACCGAGUCGGUGCUUUU |
| 1089 | GUUUAAGAGCUAAGCUGGAAACAGCAUAGCAAGUUUAAAUAAG |
| | GCUAGUCCGUUAUCAACUUGAAAAAGUGGCACCGAGUCGGUGC |
| | UUUUUU |
| 1090 | GUUUAAGAGCUAAGCUGGAAACAGCAUAGCAAGUUUAAAUAAG |
| | GCUAGUCCGUUAUCAACUUGAAAAAGUGGCACCGAGUCGGUGC |
| | UUUUUUU |

[0093] In some embodiments, the gRNA herein is provided to the cell directly (e.g., through an RNP complex together with the CRISPR-associated protein domain). In some embodiments, the gRNA is provided to the cell through an expression vector (e.g., a plasmid vector or a viral vector) introduced into the cell, where the cell then expresses the gRNA from the expression vector. Methods of introducing gRNAs and expression vectors into cells are well known in the art.

### III. Effector Domains

[0094] Epigenetic editors described herein include one or more effector protein domains (also “epigenetic effector domains,” or “effector domains,” as used herein) that effect epigenetic modification of a target gene. An epigenetic editor with one or more effector domains may modulate expression of a target gene without altering its nucleobase sequence. In some embodiments, an effector domain described herein may provide repression or silencing of expression of HBV or an HBV gene, e.g., by repressing transcription or by modifying or remodeling HBV chromatin. Such effector domains are also referred to herein as “repression domains,” “repressor domains,” “epigenetic repressor domains,” or “epigenetic repression domains.” Non-limiting examples of chemical modifications that may be mediated by effector domains include methylation, demethylation, acetylation, deacetylation, phosphorylation, SUMOylation and/or ubiquitination of DNA or histone residues.

[0095] In some embodiments, an effector domain of an epigenetic editor described herein may make histone tail modifications, e.g., by adding or removing active marks on histone tails.

[0096] In some embodiments, an effector domain of an epigenetic editor described herein may comprise or recruit a transcription-related protein, e.g., a transcription repressor. The transcription-related protein may be endogenous or exogenous.

[0097] In some embodiments, an effector domain of an epigenetic editor described herein may, for example, comprise a protein that directly or indirectly blocks access of a transcription factor to the gene of interest harboring the target sequence.

[0098] An effector domain may be a full-length protein or a fragment thereof that retains the epigenetic effector function (a “functional domain”). Functional domains that are capable of modulating (e.g., repressing) gene expression can be derived from a larger protein. For example, functional domains that can reduce target gene expression may be identified based on sequences of repressor proteins. Amino acid sequences of gene expression-modulating proteins may be obtained from available genome browsers, such as the UCSD genome browser or Ensembl genome browser. Protein annotation databases such as UniProt or Pfam can be used to identify functional domains within the full protein sequence. As a starting point, the largest sequence, encompassing all regions identified by different databases, may be tested for gene expression modulation activity. Various truncations then may be tested to identify the minimal functional unit.

[0099] Variants of effector domains described herein are also contemplated by the present disclosure. A variant may, for example, refer to a polypeptide with at least about 85%, 90%, 91%, 92%, 93%, 94%, 95%, 96%, 97%, 98%, 99%, or 100% sequence identity and/or sequence similarity to a wildtype effector domain described herein. In particular embodiments, the variant retains at least about 85%, 90%, 91%, 92%, 93%, 94%, 95%, 96%, 97%, 98%, 99%, or 100% of the epigenetic effector function of the wildtype effector domain.

[0100] In some embodiments, an epigenetic editor described herein may comprise 1 effector domain, 2 effector domains, 3 effector domains, 4 effector domains, 5 effector domains, 6 effector domains, 7 effector domains, 8 effector domains, 9 effector domains, 10 effector domains, or more. In certain embodiments, the epigenetic editor comprises one or more fusion proteins (e.g., one, two, or three fusion proteins), each with one or more effector domains (e.g., one, two, or three effector domains) linked to a DNA-binding domain. In some embodiments, the effector domains may induce a combination of epigenetic modifications, e.g., transcription repression and DNA methylation, DNA methylation and histone deacetylation, DNA methylation and histone demethylation, DNA methylation and histone methylation, DNA methylation and histone phosphorylation, DNA methylation and histone ubiquitylation, DNA methylation, and histone SUMOylation.

[0101] In certain embodiments, an effector domain described herein (e.g., DNMT3A and/or DNMT3L) is encoded by a nucleotide sequence as found in the native genome (e.g., human or murine) for that effector domain. In other embodiments, an effector domain described herein is encoded by a nucleotide sequence that has been codon-optimized for optimal expression in human cells.

[0102] Effector domains described herein may include, for example, transcriptional repressors, DNA methyltransferases, and/or histone modifiers, as further detailed below.

[0103] A. Transcriptional Repressors

[0104] In some embodiments, an epigenetic effector domain described herein mediates repression of a target gene's expression (e.g., transcription). The effector domain may comprise, e.g., a Krüppel-associated box (KRAB) repression domain, a Repressor Element Silencing Transcription Factor (REST) repression domain, a KRAB-associated protein 1 (KAP1) domain, a MAD domain, a FKHR (forkhead in rhabdosarcoma gene) repressor domain, an EGR-1 (early growth response gene product-1) repressor domain, an ets2 repressor factor repressor domain (ERD), a MAD smSIN3 interaction domain (SID), a WRPW motif (SEQ ID NO: 1246) of the hairy-related basic helix-loop-helix (bHLH) repressor proteins, an HP1 alpha chromo-shadow repression domain, an HP1 beta repression domain, or any combination thereof. The effector domain may recruit one or more protein domains that repress expression of the target gene, e.g., through a scaffold protein. In some embodiments, the effector domain may recruit or interact with a scaffold protein domain that recruits a PRMT protein, a HDAC protein, a SETDB1 protein, or a NuRD protein domain.

[0105] In some embodiments, the effector domain comprises a functional domain derived from a zinc finger repressor protein, such as a KRAB domain. KRAB domains are found in approximately 400 human ZFP-based transcription factors. Descriptions of KRAB domains may be found, for example, in Ecco et al., Development (2017) 144(15):2719-29 and Lambert et al., Cell (2018) 172:650-65.

[0106] In certain embodiments, the effector domain comprises a repression domain (e.g., KRAB) derived from KOX1/ZNF10, KOX8/ZNF708, ZNF43, ZNF184, ZNF91, HPF4, HTF10, or HTF34. In some embodiments, the effector domain comprises a repression domain (e.g., KRAB) derived from ZIM3, ZNF436, ZNF257, ZNF675, ZNF490, ZNF320, ZNF331, ZNF816, ZNF680, ZNF41, ZNF189, ZNF528, ZNF543, ZNF554, ZNF140, ZNF610, ZNF264, ZNF350, ZNF8, ZNF582, ZNF30, ZNF324, ZNF98, ZNF669, ZNF677, ZNF596, ZNF214, ZNF37, ZNF34, ZNF250, ZNF547, ZNF273, ZNF354, ZFP82, ZNF224, ZNF33, ZNF45, ZNF175, ZNF595, ZNF184, ZNF419, ZFP28-1, ZFP28-2, ZNF18, ZNF213, ZNF394, ZFP1, ZFP14, ZNF416, ZNF557, ZNF566, ZNF729, ZIM2, ZNF254, ZNF764, ZNF785, or any combination thereof. For example, the repression domain may be a KRAB domain derived from KOX1, ZIM3, ZFP28, or ZN627. In particular embodiments, the repression domain is a ZIM3 KRAB domain. In further embodiments, the effector domain is derived from a human protein, e.g., a human ZIM3, a human KOX1, a human ZFP28, or a human ZN627.

[0107] Exemplary effector domains that may reduce or silence target gene expression are provided in Table 4 below (SEQ: SEQ ID NO, see Table 20 for sequences of exemplary effector domains). Further examples of repressors and transcriptional repressor domains can be found, e.g., in PCT Patent Publication WO 2021/226077 and Tycko et al., Cell (2020) 183(7):2020-35, each of which is incorporated herein by reference in its entirety.

TABLE 4
Exemplary Effector Domains Suitable
for Silencing Gene Expression

| Protein | SEQ |
|---|---|
| ZIM3 | 495 |
| ZNF436 | 496 |
| ZNF257 | 497 |
| ZNF675 | 498 |
| ZNF490 | 499 |
| ZNF320 | 500 |
| ZNF331 | 501 |
| ZNF816 | 502 |
| ZNF680 | 503 |
| ZNF41 | 504 |
| ZNF189 | 505 |
| ZNF528 | 506 |
| ZNF543 | 507 |
| ZNF554 | 508 |
| ZNF140 | 509 |
| ZNF610 | 510 |
| ZNF264 | 511 |
| ZNF350 | 512 |
| ZNF8 | 513 |
| ZNF582 | 514 |
| ZNF30 | 515 |
| ZNF324 | 516 |
| ZNF98 | 517 |
| ZNF669 | 518 |
| ZNF677 | 519 |
| ZNF596 | 520 |
| ZNF214 | 521 |
| ZNF37A | 522 |
| ZNF34 | 523 |
| ZNF250 | 524 |
| ZNF547 | 525 |
| ZNF273 | 526 |
| ZNF354A | 527 |
| ZFP82 | 528 |
| ZNF224 | 529 |
| ZNF33A | 530 |
| ZNF45 | 531 |
| ZNF175 | 532 |
| ZNF595 | 533 |
| ZNF184 | 534 |
| ZNF419 | 535 |
| ZFP28-1 | 536 |
| ZFP28-2 | 537 |
| ZNF18 | 538 |
| ZNF213 | 539 |
| ZNF394 | 540 |
| ZFP1 | 541 |
| ZFP14 | 542 |
| ZNF416 | 543 |
| ZNF557 | 544 |
| ZNF566 | 545 |
| ZNF729 | 546 |
| ZIM2 | 547 |
| ZNF254 | 548 |
| ZNF764 | 549 |
| ZNF785 | 550 |
| ZNF10 (KOX1) | 551 |
| CBX5 (chromoshadow domain) | 552 |
| RYBP (YAF2_RYBP | 553 |
| component of PRC1) | |
| YAF2 (YAF2_RYBP | 554 |
| component of PRC1) | |
| MGA (component of PRC1.6) | 555 |
| CBX1 (chromoshadow) | 556 |
| SCMH1 (SAM_1/SPM) | 557 |
| MPP8 (Chromodomain) | 558 |
| SUMO3 (Rad60-SLD) | 559 |
| HERC2 (Cyt-b5) | 560 |
| BIN1 (SH3_9) | 561 |
| PCGF2 (RING finger | 562 |
| Protein domain) | |
| TOX (HMG box) | 563 |
| FOXA1 (HNF3A C-terminal | 564 |
| domain) | |
| FOXA2 (HNF3B C-terminal | 565 |
| domain) | |
| IRF2BP1 (IRF-2BP1_2 N- | 566 |
| terminal domain) | |
| IRF2BP2 (IRF-2BP1_2 N- | 567 |
| terminal domain) | |
| IRF2BPL IRF-2BP1_2 N- | 568 |
| terminal domain | |
| HOXA13 (homeodomain) | 569 |
| HOXB13 (homeodomain) | 570 |
| HOXC13 (homeodomain) | 571 |
| HOXA11 (homeodomain) | 572 |
| HOXC11 (homeodomain) | 573 |
| HOXC10 (homeodomain) | 574 |
| HOXA10 (homeodomain) | 575 |
| HOXB9 (homeodomain) | 576 |
| HOXA9 (homeodomain) | 577 |
| ZFP28_HUMAN | 578 |
| ZN334_HUMAN | 579 |
| ZN568_HUMAN | 580 |
| ZN37A_HUMAN | 581 |
| ZN181_HUMAN | 582 |
| ZN510_HUMAN | 583 |
| ZN862_HUMAN | 584 |
| ZN140_HUMAN | 585 |
| ZN208_HUMAN | 586 |
| ZN248_HUMAN | 587 |
| ZN571_HUMAN | 588 |
| ZN699_HUMAN | 589 |
| ZN726_HUMAN | 590 |
| ZIK1_HUMAN | 591 |
| ZNF2_HUMAN | 592 |
| Z705F_HUMAN | 593 |
| ZNF14_HUMAN | 594 |
| ZN471_HUMAN | 595 |
| ZN624_HUMAN | 596 |
| ZNF84_HUMAN | 597 |
| ZNF7_HUMAN | 598 |
| ZN891_HUMAN | 599 |
| ZN337_HUMAN | 600 |
| Z705G_HUMAN | 601 |
| ZN529_HUMAN | 602 |
| ZN729_HUMAN | 603 |
| ZN419_HUMAN | 604 |
| Z705A_HUMAN | 605 |
| ZNF45_HUMAN | 606 |
| ZN302_HUMAN | 607 |
| ZN486_HUMAN | 608 |
| ZN621_HUMAN | 609 |
| ZN688_HUMAN | 610 |
| ZN33A_HUMAN | 611 |
| ZN554_HUMAN | 612 |
| ZN878_HUMAN | 613 |
| ZN772_HUMAN | 614 |
| ZN224_HUMAN | 615 |
| ZN184_HUMAN | 616 |
| ZN544_HUMAN | 617 |
| ZNF57_HUMAN | 618 |
| ZN283_HUMAN | 619 |
| ZN549_HUMAN | 620 |
| ZN211_HUMAN | 621 |
| ZN615_HUMAN | 622 |
| ZN253_HUMAN | 623 |
| ZN226_HUMAN | 624 |
| ZN730_HUMAN | 625 |
| Z585A_HUMAN | 626 |
| ZN732_HUMAN | 627 |
| ZN681_HUMAN | 628 |
| ZN667_HUMAN | 629 |
| ZN649_HUMAN | 630 |
| ZN470_HUMAN | 631 |
| ZN484_HUMAN | 632 |
| ZN431_HUMAN | 633 |
| ZN382_HUMAN | 634 |
| ZN254_HUMAN | 635 |
| ZN124_HUMAN | 636 |
| ZN607_HUMAN | 637 |
| ZN317_HUMAN | 638 |
| ZN620_HUMAN | 639 |
| ZN141_HUMAN | 640 |
| ZN584_HUMAN | 641 |
| ZN540_HUMAN | 642 |
| ZN75D_HUMAN | 643 |
| ZN555_HUMAN | 644 |
| ZN658_HUMAN | 645 |
| ZN684_HUMAN | 646 |
| RBAK_HUMAN | 647 |
| ZN829_HUMAN | 648 |
| ZN582_HUMAN | 649 |
| ZN112_HUMAN | 650 |
| ZN716_HUMAN | 651 |
| HKR1_HUMAN | 652 |
| ZN350_HUMAN | 653 |
| ZN480_HUMAN | 654 |
| ZN416_HUMAN | 655 |
| ZNF92_HUMAN | 656 |
| ZN100_HUMAN | 657 |
| ZN736_HUMAN | 658 |
| ZNF74_HUMAN | 659 |
| CBX1_HUMAN | 660 |
| ZN443_HUMAN | 661 |
| ZN195_HUMAN | 662 |
| ZN530_HUMAN | 663 |
| ZN782_HUMAN | 664 |
| ZN791_HUMAN | 665 |
| ZN331_HUMAN | 666 |
| Z354C_HUMAN | 667 |
| ZN157_HUMAN | 668 |
| ZN727_HUMAN | 669 |
| ZN550_HUMAN | 670 |
| ZN793_HUMAN | 671 |
| ZN235_HUMAN | 672 |
| ZNF8_HUMAN | 673 |
| ZN724_HUMAN | 674 |
| ZN573_HUMAN | 675 |
| ZN577_HUMAN | 676 |
| ZN789_HUMAN | 677 |
| ZN718_HUMAN | 678 |
| ZN300_HUMAN | 679 |
| ZN383_HUMAN | 680 |
| ZN429_HUMAN | 681 |
| ZN677_HUMAN | 682 |
| ZN850_HUMAN | 683 |
| ZN454_HUMAN | 684 |
| ZN257_HUMAN | 685 |
| ZN264_HUMAN | 686 |
| ZFP82_HUMAN | 687 |
| ZFP14_HUMAN | 688 |
| ZN485_HUMAN | 689 |
| ZN737_HUMAN | 690 |
| ZNF44_HUMAN | 691 |
| ZN596_HUMAN | 692 |
| ZN565_HUMAN | 693 |
| ZN543_HUMAN | 694 |
| ZFP69_HUMAN | 695 |
| SUMO1_HUMAN | 696 |
| ZNF12_HUMAN | 697 |
| ZN169_HUMAN | 698 |
| ZN433_HUMAN | 699 |
| SUMO3_HUMAN | 700 |
| ZNF98_HUMAN | 701 |
| ZN175_HUMAN | 702 |
| ZN347_HUMAN | 703 |
| ZNF25_HUMAN | 704 |
| ZN519_HUMAN | 705 |
| Z585B_HUMAN | 706 |
| ZIM3_HUMAN | 707 |
| ZN517_HUMAN | 708 |
| ZN846_HUMAN | 709 |
| ZN230_HUMAN | 710 |
| ZNF66_HUMAN | 711 |
| ZFP1_HUMAN | 712 |
| ZN713_HUMAN | 713 |
| ZN816_HUMAN | 714 |
| ZN426_HUMAN | 715 |
| ZN674_HUMAN | 716 |
| ZN627_HUMAN | 717 |
| ZNF20_HUMAN | 718 |
| Z587B_HUMAN | 719 |
| ZN316_HUMAN | 720 |
| ZN233_HUMAN | 721 |
| ZN611_HUMAN | 722 |
| ZN556_HUMAN | 723 |
| ZN234_HUMAN | 724 |
| ZN560_HUMAN | 725 |
| ZNF77_HUMAN | 726 |
| ZN682_HUMAN | 727 |
| ZN614_HUMAN | 728 |
| ZN785_HUMAN | 729 |
| ZN445_HUMAN | 730 |
| ZFP30_HUMAN | 731 |
| ZN225_HUMAN | 732 |
| ZN551_HUMAN | 733 |
| ZN610_HUMAN | 734 |
| ZN528_HUMAN | 735 |
| ZN284_HUMAN | 736 |
| ZN418_HUMAN | 737 |
| MPP8_HUMAN | 738 |
| ZN490_HUMAN | 739 |
| ZN805_HUMAN | 740 |
| Z780B_HUMAN | 741 |
| ZN763_HUMAN | 742 |
| ZN285_HUMAN | 743 |
| ZNF85_HUMAN | 744 |
| ZN223_HUMAN | 745 |
| ZNF90_HUMAN | 746 |
| ZN557_HUMAN | 747 |
| ZN425_HUMAN | 748 |
| ZN229_HUMAN | 749 |
| ZN606_HUMAN | 750 |
| ZN155_HUMAN | 751 |
| ZN222_HUMAN | 752 |
| ZN442_HUMAN | 753 |
| ZNF91_HUMAN | 754 |
| ZN135_HUMAN | 755 |
| ZN778_HUMAN | 756 |
| RYBP_HUMAN | 757 |
| ZN534_HUMAN | 758 |
| ZN586_HUMAN | 759 |
| ZN567_HUMAN | 760 |
| ZN440_HUMAN | 761 |
| ZN583_HUMAN | 762 |
| ZN441_HUMAN | 763 |
| ZNF43_HUMAN | 764 |
| CBX5_HUMAN | 765 |
| ZN589_HUMAN | 766 |
| ZNF10_HUMAN | 767 |
| ZN563_HUMAN | 768 |
| ZN561_HUMAN | 769 |
| ZN136_HUMAN | 770 |
| ZN630_HUMAN | 771 |
| ZN527_HUMAN | 772 |
| ZN333_HUMAN | 773 |
| Z324B_HUMAN | 774 |
| ZN786_HUMAN | 775 |
| ZN709_HUMAN | 776 |
| ZN792_HUMAN | 777 |
| ZN599_HUMAN | 778 |
| ZN613_HUMAN | 779 |
| ZF69B_HUMAN | 780 |
| ZN799_HUMAN | 781 |
| ZN569_HUMAN | 782 |
| ZN564_HUMAN | 783 |
| ZN546_HUMAN | 784 |
| ZFP92_HUMAN | 785 |
| YAF2_HUMAN | 786 |
| ZN723_HUMAN | 787 |
| ZNF34_HUMAN | 788 |
| ZN439_HUMAN | 789 |
| ZFP57_HUMAN | 790 |
| ZNF19_HUMAN | 791 |
| ZN404_HUMAN | 792 |
| ZN274_HUMAN | 793 |
| CBX3_HUMAN | 794 |
| ZNF30_HUMAN | 795 |
| ZN250_HUMAN | 796 |
| ZN570_HUMAN | 797 |
| ZN675_HUMAN | 798 |
| ZN695_HUMAN | 799 |
| ZN548_HUMAN | 800 |
| ZN132_HUMAN | 801 |
| ZN738_HUMAN | 802 |
| ZN420_HUMAN | 803 |
| ZN626_HUMAN | 804 |
| ZN559_HUMAN | 305 |
| ZN460_HUMAN | 806 |
| ZN268_HUMAN | 807 |
| ZN304_HUMAN | 808 |
| ZIM2_HUMAN | 809 |
| ZN605_HUMAN | 810 |
| ZN844_HUMAN | 811 |
| SUMO5_HUMAN | 812 |
| ZN101_HUMAN | 813 |
| ZN783_HUMAN | 814 |
| ZN417_HUMAN | 815 |
| ZN182_HUMAN | 816 |
| ZN823_HUMAN | 817 |
| ZN177_HUMAN | 818 |
| ZN197_HUMAN | 819 |
| ZN717_HUMAN | 820 |
| ZN669_HUMAN | 821 |
| ZN256_HUMAN | 822 |
| ZN251_HUMAN | 823 |
| CBX4_HUMAN | 824 |
| PCGF2_HUMAN | 825 |
| CDY2_HUMAN | 826 |
| CDYL2_HUMAN | 827 |
| HERC2_HUMAN | 828 |
| ZN562_HUMAN | 829 |
| ZN461_HUMAN | 830 |
| Z324A_HUMAN | 831 |
| ZN766_HUMAN | 832 |
| ID2_HUMAN | 833 |
| TOX_HUMAN | 834 |
| ZN274_HUMAN | 835 |
| SCMH1_HUMAN | 836 |
| ZN214_HUMAN | 837 |
| CBX7_HUMAN | 838 |
| ID1_HUMAN | 839 |
| CREM_HUMAN | 840 |
| SCX_HUMAN | 841 |
| ASCL1_HUMAN | 842 |
| ZN764_HUMAN | 843 |
| SCML2_HUMAN | 844 |
| TWST1_HUMAN | 845 |
| CREB1_HUMAN | 846 |
| TERF1_HUMAN | 847 |
| ID3_HUMAN | 848 |
| CBX8_HUMAN | 849 |
| CBX4_HUMAN | 850 |
| GSX1_HUMAN | 851 |
| NKX22_HUMAN | 852 |
| ATF1_HUMAN | 853 |
| TWST2_HUMAN | 854 |
| ZNF17_HUMAN | 855 |
| TOX3_HUMAN | 856 |
| TOX4_HUMAN | 857 |
| ZMYM3_HUMAN | 858 |
| I2BP1_HUMAN | 859 |
| RHXF1_HUMAN | 860 |
| SSX2_HUMAN | 861 |
| I2BPL_HUMAN | 862 |
| ZN680_HUMAN | 863 |
| CBX1_HUMAN | 864 |
| TRI68_HUMAN | 865 |
| HXA13_HUMAN | 866 |
| PHC3_HUMAN | 867 |
| TCF24_HUMAN | 868 |
| CBX3_HUMAN | 869 |
| HXB13_HUMAN | 870 |
| HEY1_HUMAN | 871 |
| PHC2_HUMAN | 872 |
| ZNF81_HUMAN | 873 |
| FIGLA_HUMAN | 874 |
| SAM11_HUMAN | 875 |
| KMT2B_HUMAN | 876 |
| HEY2_HUMAN | 877 |
| JDP2_HUMAN | 878 |
| HXC13_HUMAN | 879 |
| ASCL4_HUMAN | 880 |
| HHEX_HUMAN | 881 |
| HERC2_HUMAN | 882 |
| GSX2_HUMAN | 883 |
| BIN1_HUMAN | 884 |
| ETV7_HUMAN | 885 |
| ASCL3_HUMAN | 886 |
| PHC1_HUMAN | 887 |
| OTP_HUMAN | 888 |
| I2BP2_HUMAN | 889 |
| VGLL2_HUMAN | 890 |
| HXA11_HUMAN | 891 |
| PDLI4_HUMAN | 892 |
| ASCL2_HUMAN | 893 |
| CDX4_HUMAN | 894 |
| ZN860_HUMAN | 895 |
| LMBL4_HUMAN | 896 |
| PDIP3_HUMAN | 897 |
| NKX25_HUMAN | 898 |
| CEBPB_HUMAN | 899 |
| ISL1_HUMAN | 900 |
| CDX2_HUMAN | 901 |
| PROP1_HUMAN | 902 |
| SIN3B_HUMAN | 903 |
| SMBT1_HUMAN | 904 |
| HXC11_HUMAN | 905 |
| HXC10_HUMAN | 906 |
| PRS6A_HUMAN | 907 |
| VSX1_HUMAN | 908 |
| NKX23_HUMAN | 909 |
| MTG16_HUMAN | 910 |
| HMX3_HUMAN | 911 |
| HMX1_HUMAN | 912 |
| KIF22_HUMAN | 913 |
| CSTF2_HUMAN | 914 |
| CEBPE_HUMAN | 915 |
| DLX2_HUMAN | 916 |
| ZMYM3_HUMAN | 917 |
| PPARG_HUMAN | 918 |
| PRIC1_HUMAN | 919 |
| UNC4_HUMAN | 920 |
| BARX2_HUMAN | 921 |
| ALX3_HUMAN | 922 |
| TCF15_HUMAN | 923 |
| TERA_HUMAN | 924 |
| VSX2_HUMAN | 925 |
| HXD12_HUMAN | 926 |
| CDX1_HUMAN | 927 |
| TCF23_HUMAN | 928 |
| ALX1_HUMAN | 929 |
| HXA10_HUMAN | 930 |
| RX_HUMAN | 931 |
| CXXC5_HUMAN | 932 |
| SCML1_HUMAN | 933 |
| NFIL3_HUMAN | 934 |
| DLX6_HUMAN | 935 |
| MTG8_HUMAN | 936 |
| CBX8_HUMAN | 937 |
| CEBPD_HUMAN | 938 |
| SEC13_HUMAN | 939 |
| FIP1_HUMAN | 940 |
| ALX4_HUMAN | 941 |
| LHX3_HUMAN | 942 |
| PRIC2_HUMAN | 943 |
| MAGI3_HUMAN | 944 |
| NELL1_HUMAN | 945 |
| PRRX1_HUMAN | 946 |
| MTG8R_HUMAN | 947 |
| RAX2_HUMAN | 948 |
| DLX3_HUMAN | 949 |
| DLX1_HUMAN | 950 |
| NKX26_HUMAN | 951 |
| NAB1_HUMAN | 952 |
| SAMD7_HUMAN | 953 |
| PITX3_HUMAN | 954 |
| WDR5_HUMAN | 955 |
| MEOX2_HUMAN | 956 |
| NAB2_HUMAN | 957 |
| DHX8_HUMAN | 958 |
| FOXA2_HUMAN | 959 |
| CBX6_HUMAN | 960 |
| EMX2_HUMAN | 961 |
| CPSF6_HUMAN | 962 |
| HXC12_HUMAN | 963 |
| KDM4B_HUMAN | 964 |
| LMBL3_HUMAN | 965 |
| PHX2A_HUMAN | 966 |
| EMX1_HUMAN | 967 |
| NC2B_HUMAN | 968 |
| DLX4_HUMAN | 969 |
| SRY_HUMAN | 970 |
| ZN777_HUMAN | 971 |
| NELL1_HUMAN | 972 |
| ZN398_HUMAN | 973 |
| GATA3_HUMAN | 974 |
| BSH_HUMAN | 975 |
| SF3B4_HUMAN | 976 |
| TEAD1_HUMAN | 977 |
| TEAD3_HUMAN | 978 |
| RGAP1_HUMAN | 979 |
| PHF1_HUMAN | 980 |
| FOXA1_HUMAN | 981 |
| GATA2_HUMAN | 982 |
| FOXO3_HUMAN | 983 |
| ZN212_HUMAN | 984 |
| IRX4_HUMAN | 985 |
| ZBED6_HUMAN | 986 |
| LHX4_HUMAN | 987 |
| SIN3A_HUMAN | 988 |
| RBBP7_HUMAN | 989 |
| NKX61_HUMAN | 990 |
| TRI68_HUMAN | 991 |
| R51A1_HUMAN | 992 |
| MB3L1_HUMAN | 993 |
| DLX5_HUMAN | 994 |
| NOTC1_HUMAN | 995 |
| TERF2_HUMAN | 996 |
| ZN282_HUMAN | 997 |
| RGS12_HUMAN | 998 |
| ZN840_HUMAN | 999 |
| SPI2B_HUMAN | 1000 |
| PAX7_HUMAN | 1001 |
| NKX62_HUMAN | 1002 |
| ASXL2_HUMAN | 1003 |
| FOXO1_HUMAN | 1004 |
| GATA3_HUMAN | 1005 |
| GATA1_HUMAN | 1006 |
| ZMYM5_HUMAN | 1007 |
| ZN783_HUMAN | 1008 |
| SPI2B_HUMAN | 1009 |
| LRP1_HUMAN | 1010 |
| MIXL1_HUMAN | 1011 |
| SGT1_HUMAN | 1012 |
| LMCD1_HUMAN | 1013 |
| CEBPA_HUMAN | 1014 |
| GATA2_HUMAN | 1015 |
| SOX14_HUMAN | 1016 |
| WTIP_HUMAN | 1017 |
| PRP19_HUMAN | 1018 |
| CBX6_HUMAN | 1019 |
| NKX11_HUMAN | 1020 |
| RBBP4_HUMAN | 1021 |
| DMRT2_HUMAN | 1022 |
| SMCA2_HUMAN | 1023 |
| ZNF10_HUMAN | 1024 |
| EED_HUMAN | 1025 |
| RCOR1_HUMAN | 1026 |

[0108] A functional analog of any one of the above-listed proteins, i.e., a molecule having the same or substantially the same biological function (e.g., retaining 70% or more, 80% or more, 90% or more, 95% or more, or 98% or more) of the protein's transcription factor function) is encompassed by the present disclosure. For example, the functional analog may be an isoform or a variant of the above-listed protein, e.g., containing a portion of the above protein with or without additional amino acid residues and/or containing mutations relative to the above protein. In some embodiments, the functional analog has a sequence identity that is at least 75, 80, 85, 90, 95, 98, or 99% to one of the sequences listed in Table 4. Homologs, orthologs, and mutants of the above-listed proteins are also contemplated.

[0109] In certain embodiments, an epigenetic editor described herein comprises a KRAB domain derived from KOX1, ZIM3, ZFP28, or ZN627, and/or an effector domain derived from KAP1, MECP2, HP1a, HP1b, CBX8, CDYL2, TOX, TOX3, TOX4, EED, EZH2, RBBP4, RCOR1, or SCML2, optionally wherein the parental protein is a human protein. In particular embodiments, an epigenetic editor described herein comprises a domain derived from KOX1, ZIM3, ZFP28, and/or ZN627, optionally wherein the parental protein is a human protein. In certain embodiments, the epigenetic editor may comprise a KRAB domain derived from KOX1 (ZNF10), e.g., a human KOX1. In certain embodiments, the epigenetic editor may comprise a KRAB domain derived from ZIM3 (ZNF657 or ZNF264), e.g., a human ZIM3. In certain embodiments, the epigenetic editor may comprise a KRAB domain derived from ZFP28, e.g., a human ZFP28. In certain embodiments, the epigenetic editor may comprise a KRAB domain derived from ZN627, e.g., a human ZN627. In certain embodiments, an epigenetic editor described herein may comprise a CDYL2, e.g., a human CDYL2, and/or a TOX domain (e.g., a human TOX domain) in combination with a KOX1 KRAB domain (e.g., a human KOX1 KRAB domain).

[0110] In certain embodiments, an epigenetic effector described herein comprises a repression domain derived from ZNF10 (SEQ ID NO: 1024). For example, the repression domain may comprise the sequence of SEQ ID NO: 1024, or a sequence at least 75%, 80%, 85%, 90%, 91%, 92%, 93%, 94%, 95%, 96%, 97%, 98%, or 99% identical to SEQ ID NO: 1024.

[0111] B. DNA Methyltransferases

[0112] In some embodiments, an effector domain of an epigenetic editor described herein alters target gene expression through DNA modification, such as methylation. Highly methylated areas of DNA tend to be less transcriptionally active than less methylated areas. DNA methylation occurs primarily at CpG sites (shorthand for “C-phosphate-G-” or “cytosine-phosphate-guanine” sites). Many mammalian genes have promoter regions near or including CpG islands (nucleic acid regions with a high frequency of CpG dinucleotides).

[0113] An effector domain described herein may be, e.g., a DNA methyltransferase (DNMT) or a catalytic domain thereof, or may be capable of recruiting a DNA methyltransferase. DNMTs encompass enzymes that catalyze the transfer of a methyl group to a DNA nucleotide, such as canonical cytosine-5 DNMTs that catalyze the addition of methyl groups to genomic DNA (e.g., DNMT1, DNMT3A, DNMT3B, and DNMT3C). This term also encompasses non-canonical family members that do not catalyze methylation themselves but that recruit (including activate) catalytically active DNMTs; a non-limiting example of such a DNMT is DNMT3L. See, e.g., Lyko, Nat Review (2018) 19:81-92. Unless otherwise indicated, a DNMT domain may refer to a polypeptide domain derived from a catalytically active DNMT (e.g., DNMT1, DNMT3A, and DNMT3B) or from a catalytically inactive DNMT (e.g., DNMT3L). A DNMT may repress expression of the target gene through the recruitment of repressive regulatory proteins. In some embodiments, the methylation is at a CG (or CpG) dinucleotide sequence. In some embodiments, the methylation is at a CHG or CHH sequence, where H is any one of A, T, or C. In some embodiments, DNMTs in the epigenetic editors may include, e.g., DNMT1, DNMT3A, DNMT3B, and/or DNMT3C. In some embodiments, the DNMT is a mammalian (e.g., human or murine) DNMT. In particular embodiments, the DNMT is DNMT3A (e.g., human DNMT3A). In certain embodiments, an epigenetic editor described herein comprises a DNMT3A domain comprising SEQ ID NO: 1028, or a sequence at least 75%, 80%, 85%, 90%, 91%, 92%, 93%, 94%, 95%, 96%, 97%, 98%, or 99% identical to SEQ ID NO: 1028. In certain embodiments, an epigenetic editor described herein comprises a DNMT3A domain comprising SEQ ID NO: 1029, or a sequence at least 75%, 80%, 85%, 90%, 91%, 92%, 93%, 94%, 95%, 96%, 97%, 98%, or 99% identical to SEQ ID NO: 1029. In some embodiments, the DNMT3A domain may have, e.g., a mutation at position H739 (such as H739A or H739E), R771 (such as R771L) and/or R836 (such as R836A or R836Q), or any combination thereof (numbering according to SEQ ID NO: 1028).

[0114] In some embodiments, an effector domain described herein may be a DNMT-like domain. As used herein a “DNMT-like domain” is a regulatory factor of DNA methyltransferase that may activate or recruit other DNMT domains, but does not itself possess methylation activity. In some embodiments, the DNMT-like domain is a mammalian (e.g., human or mouse) DNMT-like domain. In certain embodiments, the DNMT-like domain is DNMT3L, which may be, for example, human DNMT3L or mouse DNMT3L. In certain embodiments, an epigenetic editor described herein comprises a DNMT3L domain comprising SEQ ID NO: 1032, or a sequence at least 75%, 80%, 85%, 90%, 91%, 92%, 93%, 94%, 95%, 96%, 97%, 98%, or 99% identical to SEQ ID NO: 1032. In certain embodiments, an epigenetic editor herein comprises a DNMT3L domain comprising SEQ ID NO: 1033, or a sequence at least 75%, 80%, 85%, 90%, 91%, 92%, 93%, 94%, 95%, 96%, 97%, 98%, or 99% identical to SEQ ID NO: 1033. In certain embodiments, an epigenetic editor described herein comprises a DNMT3L domain comprising SEQ ID NO: 1034, or a sequence at least 75%, 80%, 85%, 90%, 91%, 92%, 93%, 94%, 95%, 96%, 97%, 98%, or 99% identical to SEQ ID NO: 1034. In certain embodiments, an epigenetic editor described herein comprises a DNMT3L domain comprising SEQ ID NO: 1035, or a sequence at least 75%, 80%, 85%, 90%, 91%, 92%, 93%, 94%, 95%, 96%, 97%, 98%, or 99% identical to SEQ ID NO: 1035. In some embodiments, the DNMT3L domain may have, e.g., a mutation corresponding to that at position D226 (such as D226V), Q268 (such as Q268K), or both (numbering according to SEQ ID NO: 1032).

[0115] In certain embodiments, an epigenetic editor herein may comprise comprising both DNMT and DNMT-like effector domains. For example, the epigenetic editor may comprise a DNMT3A-3L domain, wherein DNMT3A and DNMT3L may be covalently linked. In other embodiments, an epigenetic editor described herein may comprise an effector domain that comprises only a DNMT3A domain (e.g., human DNMT3A), or only a DNMT-like domain (e.g., DNMT3L, which may be human or mouse DNMT3L).

[0116] Table 5 below provides exemplary methyltransferases from which an effector domain of an epigenetic editor described herein may be derived. See Table 20 for sequences of these exemplary methyltransferases.

TABLE 5
Exemplary DNA Methyltransferase Sequences

| Protein Name | Species | Target | Protein Sequence |
|---|---|---|---|
| DNMT1 | Human | 5 mC | SEQ ID NO: 1027 |
| DNMT3A | Human | 5 mC | SEQ ID NO: 1028 |
| DNMT3A | Human | 5 mC | SEQ ID NO: 1029 |
| (catalytic | | | |
| domain) | | | |
| DNMT3B | Human | 5 mC | SEQ ID NO: 1030 |
| DNMT3C | Mouse | 5 mC | SEQ ID NO: 1031 |
| DNMT3L | Human | 5 mC | SEQ ID NO: 1032 |
| DNMT3L | Human | 5 mC | SEQ ID NO: 1033 |
| (catalytic | | | |
| domain) | | | |
| DNMT3L | Mouse | 5 mC | SEQ ID NO: 1034 |
| DNMT3L | Mouse | 5 mC | SEQ ID NO: 1035 |
| (catalytic | | | |
| domain) | | | |
| TRDMT1 | Human | IRNA 5 mC | SEQ ID NO: 1036 |
| (DNMT2) | | | |
| M.MpeI | Mycoplasma penetrans | 5 mC | SEQ ID NO: 1037 |
| M.SssI | Spiroplasma monobiae | 5 mC | SEQ ID NO: 1038 |
| M.HpaII | Haemophilus | 5 mC (CCGG) | SEQ ID NO: 1039 |
| | parainfluenzae | | |
| M.AluI | Arthrobacter luteus | 5 mC (AGCT) | SEQ ID NO: 1040 |
| M.HaeIII | Haemophilus aegyptius | 5 mC (GGCC) | SEQ ID NO: 1041 |
| M.HhaI | Haemophilus haemolyticus | 5 mC (GCGC) | SEQ ID NO: 1042 |
| M.MspI | Moraxella | 5 mC (CCGG) | SEQ ID NO: 1043 |
| Masc1 | Ascobolus | 5 mC | SEQ ID NO: 1044 |
| MET1 | Arabidopsis | 5 mC | SEQ ID NO: 1045 |
| Masc2 | Ascobolus | 5 mC | SEQ ID NO: 1046 |
| Dim-2 | Neurospora | 5 mC | SEQ ID NO: 1047 |
| dDnmt2 | Drosophila | 5 mC | SEQ ID NO: 1048 |
| Pmt1 | S. pombe | 5 mC | SEQ ID NO: 1049 |
| DRM1 | Arabidopsis | 5 mC | SEQ ID NO: 1050 |
| DRM2 | Arabidopsis | 5 mC | SEQ ID NO: 1051 |
| CMT1 | Arabidopsis | 5 mC | SEQ ID NO: 1052 |
| CMT2 | Arabidopsis | 5 mC | SEQ ID NO: 1053 |
| CMT3 | Arabidopsis | 5 mC | SEQ ID NO: 1054 |
| Rid | Neurospora | 5 mC | SEQ ID NO: 1055 |
| hsdM gene | bacteria | m6A | SEQ ID NO: 1056 |
| | (E. coli, strain 12) | | |
| hsdS gene | bacteria | m6A | SEQ ID NO: 1057 |
| | (E. coli, strain 12) | | |
| M.Taql | Bacteria | m6A | SEQ ID NO: 1058 |
| | (Thermus aquaticus) | | |
| M.EcoDam | E. coli | m6A | SEQ ID NO: 1059 |
| M.CcrMI | Caulobacter crescentus | m6A | SEQ ID NO: 1060 |
| CamA | Clostridioides | m6A | SEQ ID NO: 1061 |
| | difficile | | |

[0117] A functional analog of any one of the above-listed proteins, i.e., a molecule having the same or substantially the same biological function (e.g., retaining 70% or more, 80% or more, 90% or more, 95% or more, or 98% or more) of the protein's DNA methylation function or recruiting function) is encompassed by the present disclosure. For example, the functional analog may be an isoform or a variant of the above-listed protein, e.g., containing a portion of the above protein with or without additional amino acid residues and/or containing mutations relative to the above protein. In some embodiments, the functional analog has a sequence identity that is at least 75, 80, 85, 90, 95, 98, or 99% to one of the sequences listed in Table 5. In some embodiments, the effector domain herein comprises only the functional domain (or functional analog thereof), e.g., the catalytical domain or recruiting domain, of the above-listed proteins.

[0118] As used herein, a DNMT domain (e.g., a DNMT3A domain or a DNMT3L domain) refers to a protein domain that is identical to the parental protein (e.g., a human or murine DNMT3A or DNMT3L) or a functional analog thereof (e.g., having a functional fragment, such as a catalytic fragment or recruiting fragment, of the parental protein; and/or having mutations that improve the activity of the DNMT protein).

[0119] An epigenetic editor herein may effect methylation at, e.g., 1, 2, 3, 4, 5, 6, 7, 8, 9, 10, 11, 12, 13, 14, 15, 16, 17, 18, 19, 20, 30, 40, 50, 60, 70, 80, 90, 100, 200, 300, 400, 500, 600, 700, 800, 900, or 1000 or more CpG dinucleotide sequences in the target gene or chromosome. The CpG dinucleotide sequences may be located within or near the target gene in CpG islands, or may be located in a region that is not a CpG island. A CpG island generally refers to a nucleic acid sequence or chromosome region that comprises a high frequency of CpG dinucleotides. For example, a CpG island may comprise at least 50% GC content. The CpG island may have a high observed-to-expected CpG ratio, for example, an observed-to-expected CpG ratio of at least 60%. As used herein, an observed-to-expected CpG ratio is determined by Number of CpG*(sequence length)/(Number of C*Number of G). In some embodiments, the CpG island has an observed-to-expected CpG ratio of at least 60%, 70%, 80%, 90% or more. A CpG island may be a sequence or region of, e.g., at least 200, 250, 300, 350, 400, 450, 500, 550, 600, 650, 700, 750, or 800 nucleotides. In some embodiments, only 1, or less than 2, 3, 4, 5, 6, 7, 8, 9, 10, 11, 12, 13, 14, 15, 16, 17, 18, 19, 20, 30, 40, or 50 CpG dinucleotides are methylated by the epigenetic editor.

[0120] In some embodiments, an epigenetic editor herein effects methylation at a hypomethylated nucleic acid sequence, i.e., a sequence that may lack methyl groups on the 5-methyl cytosine nucleotides (e.g., in CpG) as compared to a standard control. Hypomethylation may occur, for example, in aging cells or in cancer (e.g., early stages of neoplasia) relative to a younger cell or non-cancer cell, respectively.

[0121] In some embodiments, an epigenetic editor described herein induces methylation at a hypermethylated nucleic acid sequence.

[0122] In some embodiments, methylation may be introduced by the epigenetic editor at a site other than a CpG dinucleotide. For example, the target gene sequence may be methylated at the C nucleotide of CpA, CpT, or CpC sequences. In some embodiments, an epigenetic editor comprises a DNMT3A domain and effects methylation at CpG, CpA, CpT, CpC sequences, or any combination thereof. In some embodiments, an epigenetic editor comprises a DNMT3A domain that lacks a regulatory subdomain and only maintains a catalytic domain. In some embodiments, the epigenetic editor comprising a DNMT3A catalytic domain effects methylation exclusively at CpG sequences. In some embodiments, an epigenetic editor comprising a DNMT3A domain that comprises a mutation, e.g. a R836A or R836Q mutation (numbering according to SEQ ID NO: 1028), has higher methylation activity at CpA, CpC, and/or CpT sequences as compared to an epigenetic editor comprising a wildtype DNMT3A domain.

[0123] C. Histone Modifiers

[0124] In some embodiments, an effector domain of an epigenetic editor herein mediates histone modification. Histone modifications play a structural and biochemical role in gene transcription, such as by formation or disruption of the nucleosome structure that binds to the histone and prevents gene transcription. Histone modifications may include, for example, acetylation, deacetylation, methylation, phosphorylation, ubiquitination, SUMOylation and the like, e.g., at their N-terminal ends (“histone tails”). These modifications maintain or specifically convert chromatin structure, thereby controlling responses such as gene expression, DNA replication, DNA repair, and the like, which occur on chromosomal DNA. Post-translational modification of histones is an epigenetic regulatory mechanism and is considered essential for the genetic regulation of eukaryotic cells. Recent studies have revealed that chromatin remodeling factors such as SWI/SNF, RSC, NURF, NRD, and the like, which facilitate transcription factor access to DNA by modifying the nucleosome structure; histone acetyltransferases (HATs) that regulate the acetylation state of histones; and histone deacetylases (HDACs), act as important regulators.

[0125] In particular, the unstructured N-termini of histones may be modified by acetylation, deacetylation, methylation, ubiquitylation, phosphorylation, SUMOylation, ribosylation, citrullination 0-G1cNAcylation, crotonylation, or any combination thereof. For example, histone acetyltransferases (HATs) utilize acetyl-CoA as a cofactor and catalyze the transfer of an acetyl group to the epsilon amino group of the lysine side chains. This neutralizes the lysine's positive charge and weakens the interactions between histones and DNA, thus opening the chromosomes for transcription factors to bind and initiate transcription. Acetylation of K14 and K9 lysines of histone H3 by histone acetyltransferase enzymes may be linked to transcriptional competence in humans. Lysine acetylation may directly or indirectly create binding sites for chromatin-modifying enzymes that regulate transcriptional activation. On the other hand, histone methylation of lysine 9 of histone H3 may be associated with heterochromatin, or transcriptionally silent chromatin.

[0126] In certain embodiments, an effector domain of an epigenetic editor described herein comprises a histone methyltransferase domain. The effector domain may comprise, for example, a DOT1L domain, a SET domain, a SUV39H1 domain, a G9a/EHMT2 protein domain, an EZH1 domain, an EZH2 domain, a SETDB1 domain, or any combination thereof. In particular embodiments, the effector domain comprises a histone-lysine-N-methyltransferase SETDB1 domain.

[0127] In some embodiments, the effector domain comprises a histone deacetylase protein domain. In certain embodiments, the effector domain comprises a HDAC family protein domain, for example, a HDAC1, HDAC3, HDACS, HDAC7, or HDAC9 protein domain. In particular embodiments, the effector domain comprises a nucleosome remodeling and deacetylase complex (NURD), which removes acetyl groups from histones.

[0128] D. Other Effector Domains

[0129] In some embodiments, the effector domain comprises a tripartite motif containing protein (TRIM28, TIF1-beta, or KAP1). In certain embodiments, the effector domain comprises one or more KAP1 proteins. A KAP1 protein in an epigenetic editor herein may form a complex with one or more other effector domains of the epigenetic editor or one or more proteins involved in modulation of gene expression in a cellular environment. For example, KAP1 may be recruited by a KRAB domain of a transcriptional repressor. A KAP1 protein domain may interact with or recruit one or more protein complexes that reduces or silences gene expression. In some embodiments, KAP1 interacts with or recruits a histone deacetylase protein, a histone-lysine methyltransferase protein, a chromatin remodeling protein, and/or a heterochromatin protein. For example, a KAP1 protein domain may interact with or recruit a heterochromatin protein 1 (HP1) protein, a SETDB1 protein, an HDAC protein, and/or a NuRD protein complex component. In some embodiments, a KAP1 protein domain interacts with or recruits a ZFP90 protein (e.g., isoform 2 of ZFP90), and/or a FOXP3 protein. An exemplary KAP1 amino acid sequence is shown in SEQ ID NO: 1062.

[0130] In some embodiments, the effector domain comprises a protein domain that interacts with or is recruited by one or more DNA epigenetic marks. For example, the effector domain may comprise a methyl CpG binding protein 2 (MECP2) protein that interacts with methylated DNA nucleotides in the target gene (which may or may not be at a CpG island of the target gene). An MECP2 protein domain in an epigenetic editor described herein may induce condensed chromatin structure, thereby reducing or silencing expression of the target gene. In some embodiments, an MECP2 protein domain in an epigenetic editor described herein may interact with a histone deacetylase (e.g. HDAC), thereby repressing or silencing expression of the target gene. In some embodiments, an MECP2 protein domain in an epigenetic editor described herein may block access of a transcription factor or transcriptional activator to the target sequence, thereby repressing or silencing expression of the target gene. An exemplary MECP2 amino acid sequence is shown in SEQ ID NO: 1063.

[0131] Also contemplated as effector domains for the epigenetic editors described herein are, e.g., a chromoshadow domain, a ubiquitin-2 like Rad60 SUMO-like (Rad60-SLD/SUMO) domain, a chromatin organization modifier domain (Chromo) domain, a Yaf2/RYBP C-terminal binding motif domain (YAF2_RYBP), a CBX family C-terminal motif domain (CBX7_C), a zinc finger C3HC4 type (RING finger) domain (ZF-C3HC4_2), a cytochrome b5 domain (Cyt-b5), a helix-loop-helix domain (HLH), a helix-hairpin-helix motif domain (e.g., HHH_3), a high mobility group box domain (HMG-box), a basic leucine zipper domain (e.g., bZIP 1 or bZIP_2), a Myb DNA-binding domain, a homeodomain, a MYM-type Zinc finger with FCS sequence domain (ZF-FCS), an interferon regulatory factor 2-binding protein zinc finger domain (IRF-2BP1_2), an SSX repression domain (SSXRD), a B-box-type zinc finger domain (ZF-B_box), a COX zinc finger domain (ZF-CXXC), a regulator of chromosome condensation 1 domain (RCC1), an SRC homology 3 domain (SH3_9), a sterile alpha motif domain (SAM_1), a sterile alpha motif domain (SAM_2), a sterile alpha motif/Pointed domain (SAM_PNT), a Vestigial/Tondu family domain (Vg_Tdu), a LIM domain, an RNA recognition motif domain (RRM_1), a paired amphipathic helix domain (PAH), a proteasomal ATPase OB C-terminal domain (Prot_ATP_ID_OB), a nervy homology 2 domain (NHR2), a hinge domain of cleavage stimulation factor subunit 2 (CSTF2_hinge), a PPAR gamma N-terminal region domain (PPARgamma_N), a CDC48 N-terminal domain (CDC48_2), a WD40 repeat domain (WD40), a Fip1 motif domain (Fip1), a PDZ domain (PDZ_6), a Von Willebrand factor type C domain (VWC), a NAB conserved region 1 domain (NCD1), an S1 RNA-binding domain (S1), an HNF3 C-terminal domain (HNF_C), a Tudor domain (Tudor_2), a histone-like transcription factor (CBF/NF-Y) and archaeal histone domain (CBFD_NFYB_HMF), a zinc finger protein domain (DUF3669), an EGF-like domain (cEGF), a GATA zinc finger domain (GATA), a TEA/ATTS domain (TEA), a phorbol esters/diacylglycerol binding domain (C1-1), polycomb-like MTF2 factor 2 domain (Mtf2_C), a transactivation domain of FOXO protein family (FOXO-TAD), a homeobox KN domain (Homeobox_KN), a BED zinc finger domain (ZF-BED), a zinc finger of C3HC4-type RING domain (ZF-C3HC4_4), a RAD51 interacting motif domain (RAD51_interact), a p55-binding region of a methyl-CpG-binding domain protein MBD (MBDa), a Notch domain, a Raf-like Ras-binding domain (RBD), a Spin/Ssty family domain (Spin-Ssty), a PHD finger domain (PHD 3), a Low-density lipoprotein receptor domain class A (Ldl_recept_a), a CS domain, a DM DNA-binding domain, and a QLQ domain.

[0132] In some embodiments, the effector domain is a protein domain comprising a YAF2_RYBP domain or homeodomain or any combination thereof. In certain embodiments, the homeodomain of the YAF2_RYBP domain is a PRD domain, an NKL domain, a HOXL domain, or a LIM domain. In particular embodiments, the YAF2_RYBP domain may comprise a 32 amino acid Yaf2/RYBP C-terminal binding motif domain (32 aa RYBP).

[0133] In some embodiments, the effector domain comprises a protein domain selected from a group consisting of SUMO3 domain, Chromo domain from M phase phosphoprotein 8 (MPP8), chromoshadow domain from Chromobox 1 (CBX1), and SAM_1/SPM domain from Scm Polycomb Group Protein Homolog 1 (SCMH1).

[0134] In some embodiments, the effector domain comprises an HNF3 C-terminal domain (HNF_C). The HNF_C domain may be from FOXA1 or FOXA2. In certain embodiments, the HNF_C domain comprises an EH1 (engrailed homology 1) motif

[0135] In some embodiments, the effector domain may comprise an interferon regulatory factor 2-binding protein zinc finger domain (IRF-2BP1_2), a Cyt-b5 domain from DNA repair factor HERC2 E3 ligase, a variant SH3 domain (SH3_9) from Bridging Integrator 1 (BIN1), an HMG-box domain from transcription factor TOX or ZF-C3HC4 2 RING finger domain from the polycomb component PCGF2, a Chromodomain-helicase-DNA binding protein 3 (CHD3) domain, or a ZNF783 domain.

### IV. Epigenetic Editors

[0136] Provided herein are epigenetic editors, also referred to herein as epigenetic editing systems, that direct epigenetic modification(s) to a target sequence in a gene of interest, e.g., using one or more DNA-binding domains as described herein and one or more effector domains (e.g., epigenetic repression domains) as described herein, in any combination. The DNA-binding domain (in concert with a guide polynucleotide such as one described herein, where the DNA-binding domain is a polynucleotide guided DNA-binding domain) directs the effector domain to epigenetically modify the target sequence, resulting in gene repression or silencing that may be durable and inheritable across cell generations. In some aspects, the epigenetic editors described herein can repress or silence genes reversibly or irreversibly in cells.

[0137] In particular embodiments, an epigenetic editor described herein comprises one or more fusion proteins, each comprising (1) DNA-binding domain(s) and (2) effector domain(s). The effector domains may be on one or more fusion proteins comprised by the epigenetic editor. For example, a single fusion protein may comprise all of the effector domains with a DNA-binding domain. Alternatively, the effector domains or subsets thereof may be on separate fusion proteins, each with a DNA-binding domain (which may be the same or different). A fusion protein described herein may further comprise one or more linkers (e.g., peptide linkers), detectable tags, nuclear localization signals (NLSs), or any combination thereof. As used herein, a “fusion protein” refers to a chimeric protein in which two or more coding sequences (e.g., for DNA-binding domain(s) and/or effector domain(s)) are covalently or non-covalently joined, directly or indirectly.

[0138] In some embodiments, an epigenetic editor described herein comprises 2, 3, 4, 5, 6, 7, 8, 9, 10, or more effector (e.g., repression) domains, which may be identical or different. In certain embodiments, two or more of said effector domains function synergistically. Combinations of effector domains may comprise DNA methylation domains, histone deacetylation domains, histone methylation domains, and/or scaffold domains that recruit any of the above. For example, an epigenetic editor described herein may comprise one or more transcriptional repressor domains (e.g., a KRAB domain such as KOX1, ZIM3, ZFP28, or ZN627 KRAB) in combination with one or more DNA methylation domains (e.g., a DNMT domain) and/or recruiter domain (e.g., a DNMT3L domain). Such an epigenetic editor may comprise, for instance, a KRAB domain, a DNMT3A domain, and a DNMT3L domain. An epigenetic editor can comprise a DNMT3A domain and a DNMT3L domain and preferably further comprise a KRAB domain. In some embodiments, the epigenetic editor further comprises an additional effector domain (e.g., a KAP1, MECP2, HP1b, CBX8, CDYL2, TOX, TOX3, TOX4, EED, RBBP4, RCOR1, or SCML2 domain). In some embodiments, the additional effector domain is a CDYL2, TOX, TOX3, TOX4, or HP1a domain. For example, an epigenetic editor described herein may comprise a CDYL2 and/or a TOX domain in combination with a KRAB domain (e.g., a KOX1 KRAB domain).

[0139] A. Linkers

[0140] A fusion protein as described herein may comprise one or more linkers that connect components of the epigenetic editor. A linker may be a peptide or non-peptide linker.

[0141] In some embodiments, one or more linkers utilized in an epigenetic editor provided herein is a peptide linker, i.e., a linker comprising a peptide moiety. A peptide linker can be any length applicable to the epigenetic editor fusion proteins described herein. In some embodiments, the linker can comprise a peptide between 1 and 200 (e.g., between 1 and 80) amino acids. In some embodiments, the linker comprises from 1 to 5, 1 to 10, 1 to 20, 1 to 30, 1 to 40, 1 to 50, 1 to 60, 1 to 80, 1 to 100, 1 to 150, 1 to 200, 5 to 10, 5 to 20, 5 to 30, 5 to 40, 5 to 60, 5 to 80, 5 to 100, 5 to 150, 5 to 200, 10 to 20, 10 to 30, 10 to 40, 10 to 50, 10 to 60, 10 to 80, 10 to 100, 10 to 150, 10 to 200, 20 to 30, 20 to 40, 20 to 50, 20 to 60, 20 to 80, 20 to 100, 20 to 150, 20 to 200, 30 to 40, 30 to 50, 30 to 60, 30 to 80, 30 to 100, 30 to 150, 30 to 200, 40 to 50, 40 to 60, 40 to 80, 40 to 100, 40 to 150, 40 to 200, 50 to 60 50 to 80, 50 to 100, 50 to 150, 50 to 200, 60 to 80, 60 to 100, 60 to 150, 60 to 200, 80 to 100, 80 to 150, 80 to 200, 100 to 150, 100 to 200, or 150 to 200 amino acids in length. Longer or shorter linkers are also contemplated. In some embodiments, the peptide linker is 3, 4, 5, 6, 7, 8, 9, 10, 11, 12, 13, 14, 15, 16, 17, 18, 19, 20, 25, 30, 25, 40, 45, 50, 55, 60, 65, 70, 75, 80, 85, 90, 95, or 100 amino acids in length. For example, the peptide linker may be 4, 5, 16, 20, 24, 27, 32, 40, 64, 92, or 104 amino acids in length. The peptide linker may be a flexible or rigid linker. In particular embodiments, the peptide linker comprises the amino acid sequence of any one of SEQ ID NOs: 1064-1068 or a sequence at least 75%, 80%, 85%, 90%, 91%, 92%, 93%, 94%, 95%, 96%, 97%, 98%, or 99% identical thereto.

[0142] In certain embodiments, the peptide linker is an XTEN linker. Such a linker may comprise part of the XTEN sequence (Schellenberger et al., Nat Biotechnol (2009) 27(1):1186-90), an unstructured hydrophilic polypeptide consisting only of residues G, S, P, T, E, and A. The term “XTEN” as used herein refers to a recombinant peptide or polypeptide lacking hydrophobic amino acid residues. XTEN linkers typically are unstructured and comprise a limited set of natural amino acids. Fusion of XTEN to proteins alters its hydrodynamic properties and reduces the rate of clearance and degradation of the fusion protein. These XTEN fusion proteins are produced using recombinant technology, without the need for chemical modifications, and degraded by natural pathways. The XTEN linker may be, for example, 5, 10, 16, 20, 26, or 80 amino acids in length. In some embodiments, the XTEN linker is 16 amino acids in length. In some embodiments, the XTEN linker is 80 amino acids in length. In certain embodiments, the XTEN linker may be XTEN10, XTEN16, XTEN20, or XTEN80. In certain embodiments, the XTEN linker may comprise the amino acid sequence of any one of SEQ ID NOs: 1069-1073 and 1092 or a sequence at least 75%, 80%, 85%, 90%, 91%, 92%, 93%, 94%, 95%, 96%, 97%, 98%, or 99% identical thereto. In some embodiments, the XTEN linker may be XTEN10, XTEN16, XTEN20, or XTEN80.

[0143] In some embodiments, one or more linkers utilized in an epigenetic editor provided herein is a non-peptide linker. For example, the linker may be a carbon bond, a disulfide bond, or carbon-heteroatom bond. In certain embodiments, the linker is a carbon-nitrogen bond of an amide linkage. In certain embodiments, the linker is a cyclic or acyclic, substituted or unsubstituted, or branched or unbranched aliphatic or heteroaliphatic linker.

[0144] In some embodiments, one or more linkers utilized in an epigenetic editor provided herein is polymeric (e.g., polyethylene, polyethylene glycol, polyamide, polyester, etc.). The linker may comprise, for example, a monomer, dimer, or polymer of aminoalkanoic acid; an aminoalkanoic acid (e.g., glycine, ethanoic acid, alanine, beta-alanine, 3-aminopropanoic acid, 4-aminobutanoic acid, 5-pentanoic acid, etc.); a monomer, dimer, or polymer of aminohexanoic acid (Ahx); or a polyethylene glycol moiety (PEG); or an aryl or heteroaryl moiety. In certain embodiments, the linker may be based on a carbocyclic moiety (e.g., cyclopentane or cyclohexane) or a phenyl ring. The linker may include functionalized moieties to facilitate attachment of a nucleophile (e.g., thiol, amino) from the peptide to the linker. Any electrophile may be used as part of the linker. Exemplary electrophiles include, but are not limited to, activated esters, activated amides, alkyl halides, aryl halides, acyl halides, and isothiocyanates.

[0145] Various linker lengths and flexibilities can be employed between any two components of an epigenetic editor (e.g., between an effector domain (e.g., a repressor domain) and a DNA-binding domain (e.g., a Cas9 domain), between a first effector domain and a second effector domain, etc.). The linkers may range from very flexible linkers, such as glycine/serine-rich linkers, to more rigid linkers, in order to achieve the optimal length for effector domain activity for the specific application. In some embodiments, the more flexible linkers are glycine/serine-rich linkers (GS-rich linkers), where more than 45% (e.g., more than 48, 50, 55, 60, 70, 80, or 90%) of the residues are glycine or serine residues. Non-limiting examples of the GS-rich linkers are (GGGGS)n (SEQ ID NO: 485), (G)n (SEQ ID NO: 1247), and W linker (SEQ ID NO: 486). In some embodiments, the more rigid linkers are in the form of the form (EAAAK)n (SEQ ID NO: 487), (SGGS)n (SEQ ID NO: 488), and (XP)n (SEQ ID NO: 489). In the aforementioned formulae of flexible and rigid linkers, n may be any integer between 1 and 30. In some embodiments, n is 1, 2, 3, 4, 5, 6, 7, 8, 9, 10, 11, 12, 13, 14, or 15. In some embodiments, the linker comprises a (GGS)n motif, wherein n is 1, 3, or 7 (SEQ ID NO: 490). In some embodiments, the linker comprises a (GGGGS)n motif, wherein n is 4 (SEQ ID NO: 491).

[0146] In some embodiments, a linker in an epigenetic editor described herein comprises a nuclear localization signal, for example, with the amino acid sequence of any one of SEQ ID NOs: 1074-1079. In some embodiments, a linker in an epigenetic editor described herein comprises an expression tag, e.g., a detectable tag such as a green fluorescence protein.

[0147] B. Nuclear Localization Signals

[0148] A fusion protein described herein may comprise one or more nuclear localization signals, and in certain embodiments, may comprise two or more nuclear localization signals. For example, the fusion protein may comprise 1, 2, 3, 4, or 5 nuclear localization signals. As used herein, a “nuclear localization signal” (NLS) is an amino acid sequence that directs proteins to the nucleus. In certain embodiments, the NLS may be an SV40 NLS. The fusion protein may comprise an NLS at its N-terminus, C-terminus, or both, and/or an NLS may be embedded in the middle of the fusion protein (e.g., at the N- or C-terminus of a DNA-binding domain or an effector domain). In certain embodiments, an NLS comprises the amino acid sequence of any one of SEQ ID NOs: 1074-1079, or a sequence at least 75%, 80%, 85%, 90%, 91%, 92%, 93%, 94%, 95%, 96%, 97%, 98%, or 99% identical to the selected sequence. Additional NLSs are known in the art.

[0149] C. Tags

[0150] Epigenetic editors provided herein may comprise one or more additional sequences (“tags”) for tracking, detection, and localization of the editors. In some embodiments, the epigenetic editor comprises 1, 2, 3, 4, 5, 6, 7, 8, 9, 10 or more detectable tags. Each of the detectable tags may be the same or different.

[0151] For example, an epigenetic editor fusion protein may comprise cytoplasmic localization sequences, export sequences, such as nuclear export sequences, or other localization sequences, as well as sequence tags that are useful for solubilization, purification, or detection of the fusion proteins. Suitable protein tags provided herein include, but are not limited to, biotin carboxylase carrier protein (BCCP) tags, myc-tags, calmodulin-tags, FLAG-tags, hemagglutinin (HA)-tags, poly-histidine tags (also referred to as histidine tags or His-tags), maltose binding protein (MBP)-tags, nus-tags, glutathione-S-transferase (GST)-tags, green fluorescent protein (GFP)-tags, thioredoxin-tags, S-tags, Softags (e.g., Softag 1 or Softag 3), strep-tags, biotin ligase tags, FlAsH tags, V5 tags, and SBP-tags. Additional suitable sequences will be apparent to those of skill in the art. Sequences disclosed herein that are presented with tag sequences included are also contemplated without the presented tag sequences; similarly, sequences disclosed herein without tag sequences are also contemplated to include the addition of suitable sequences apparent to those of skill in the art.

[0152] D. Fusion Protein Configurations

[0153] A fusion protein of an epigenetic editor described herein may have its components structured in different configurations. For example, the DNA-binding domain may be at the C-terminus, the N-terminus, or in between two or more epigenetic effector domains or additional domains. In some embodiments, the DNA-binding domain is at the C-terminus of the epigenetic editor. In some embodiments, the DNA-binding domain is at the N-terminus of the epigenetic editor. In some embodiments, the DNA-binding domain is linked to one or more nuclear localization signals. In some embodiments, the DNA-binding domain is flanked by an epigenetic effector domain and/or an additional domain on both sides. In some embodiments, where “DBD” indicates DNA-binding domain and “ED” indicates effector domain, the epigenetic editor comprises the configuration of:
[0154] N′]-[ED1]-[DBD]-[ED2]-[C′
[0155] N′]ED1]-[DBD]-[ED2]-[ED3]-[C′
[0156] N′]ED1]-[ED2]-[DBD]-[ED3]-[C′
[0157] or
[0158] N′]ED1]-[ED2]-DBD]-[ED3]-[ED4]-]C′.

[0159] In some embodiments, an epigenetic editor comprises a DNA-binding domain (DBD), a DNA methyltransferase (DNMT) domain, and a transcriptional repressor (“repressor”) domain that represses or silences expression of a target gene. The DBD, DNMT, and transcriptional repressor domains may be any as described herein, in any combination. For example, an epigenetic editor can comprise a DBD, a DNMT3A domain, and a DNMT3L domain. An epigenetic editor can comprise a DBD, a DNMT3A domain, a DNMT3L domain, and preferably further comprise a KRAB domain. In some embodiments, the epigenetic editor comprises a fusion protein with the configuration of:
[0160] N′]-[DNA methyltransferase domain]-[DBD]-[repressor domain]-[C′
[0161] N′]-[repressor domain]-[DBD]-[DNA methyltransferase domain]-[C′
[0162] N′]-[DNA methyltransferase domain]-[repressor domain]-[DBD]-[C′
[0163] or
[0164] N′]-[repressor domain]-[DNA methyltransferase domain]-[DBD]-[C′.

[0165] In some embodiments, a connecting structure “]-[” in any one of the epigenetic editor structures is a linker, e.g., a peptide linker; a detectable tag; a peptide bond; a nuclear localization signal; and/or a promoter or regulatory sequence. In an epigenetic editor structure, the multiple connecting structures “]-[” may be the same or may each be a different linker, tag, NLS, or peptide bond. In particular embodiments, the DNA methyltransferase domain comprises DNMT3A, DNMT3L, or both. In particular embodiments, the DBD is a catalytically inactive polynucleotide guided DNA-binding domain (e.g., a dCas9) or a ZFP domain. In particular embodiments, the repressor domain is a KRAB domain.

[0166] In some embodiments, the epigenetic editor comprises a configuration selected from
[0167] N′]-[DNMT3A-DNMT3L]-[DBD]-[KRAB]-[C′
[0168] N′]-[KRAB]-[DBD]-[DNMT3A-DNMT3L]-[C′
[0169] N′]-[KRAB]-[DBD]-[DNMT3A]-[C′
[0170] N′]-[DNMT3A]-[DBD]-[KRAB]-[C′
[0171] N′]-[KRAB]-[DBD]-[DNMT3A]-[DNMT3L]-[C′
[0172] N′]-[DNMT3A]-[DNMT3L]-[DBD]-[KRAB]-[C′
[0173] N′]-[DNMT3A]-[DBD]-[C′
[0174] N′]-[DBD]-[DNMT3A]-[C′
[0175] N′]-[DNMT3L]-[DBD]-[C′
[0176] N′]-[DBD]-[DNMT3L]-[C′
   wherein [DNMT3A-DNMT3L] indicates that the DNMT3A and DNMT3L domains are directly fused via a peptide bond, and wherein the connecting structure]-[is any one of the linkers as described herein, a detectable tag, an affinity domain, a peptide bond, a nuclear localization signal, a promoter, and/or a regulatory sequence. The DBD, KRAB, DNMT3A, and DNMT3L domains may be any as described herein, in any combination. In particular embodiments, the DBD is a CRISPR-associated protein domain (e.g., dCas9) or a ZFP domain; the KRAB domain is derived from KOX1, ZIM3, ZFP28, or ZN627; the DNMT3A domain is a human DNMT3A domain; and the DNMT3L domain is a human or mouse DNMT3L domain; any combination of these components is also contemplated by the present disclosure.

[0177] In some embodiments, the epigenetic editor comprises a configuration selected from
[0178] N′]-[DNMT3A]-[DBD]-[SETDB1]-[C′
[0179] N′]-[DNMT3A]-[DNMT3L]-[DBD]-[SETDB1]-[C′
[0180] N′]-[DNMT3A-DNMT3L]-[DBD]-[SETDB1]-[C′
[0181] N′]-[SETDB1]-[DBD]-[DNMT3A]-[DNMT3L]-[C′
[0182] N′]-[SETDB1]-[DBD]-[DNMT3A]-[C′
   wherein [DNMT3A-DNMT3L] indicates that the DNMT3A and DNMT3L domains are directly fused via a peptide bond, and wherein the connecting structure]-[is any one of the linkers as described herein, a detectable tag, an affinity domain, a peptide bond, a nuclear localization signal, a promoter, and/or a regulatory sequence. The DBD, SETDB1, DNMT3A, and DNMT3L domains may be any as described herein, in any combination. In particular embodiments, the DBD is a CRISPR-associated protein domain (e.g., dCas9) or a ZFP domain; the SETDB1 domain is derived from human SETDB1, ZIM3, ZFP28, or ZN627; the DNMT3A domain is a human DNMT3A domain; and the DNMT3L domain is a human or mouse DNMT3L domain; any combination of these components is also contemplated by the present disclosure.

[0183] Particular constructs contemplated herein include:
[0184] DNMT3A-DNMT3L-XTEN80-NLS-dCas9-NLS-XTEN16-KOX1 KRAB (Configuration 1), and
[0185] DNMT3A-DNMT3L-XTEN80-NLS-ZFP domain-NLS-XTEN16-KOX1 KRAB (Configuration 2).

[0186] In particular embodiments, the DNMT3L and DNMT3A are both derived from human parental proteins. In particular embodiments, the DNMT3L and DNMT3A are derived from human and mouse parental proteins, respectively. In particular embodiments, the DNMT3L and DNMT3A are derived from mouse and human parental proteins, respectively. In particular embodiments, the DNMT3L and DNMT3A are both derived from mouse parental proteins. In some embodiments, the dCas9 is dSpCas9. In some embodiments, the KOX1 is human KOX1.

[0187] In particular embodiments, a fusion construct described herein may have Configuration 1 and comprise SEQ ID NO: 1080, or a sequence at least 75%, 80%, 85%, 90%, 91%, 92%, 93%, 94%, 95%, 96%, 97%, 98%, or 99% identical thereto. In SEQ ID NO: 1080 below, the XTEN linkers are underlined, the NLS sequences are bolded, the DNMT3A sequence is italicized, the DNMT3L sequence is underlined and italicized, the dCas9 domain is [symbol] [symbol] and the KOX1 KRAB domain is underlined and bolded:

(SEQ ID NO: 1080)
MNHDQEFDPPKVYPPVPAEKRKPIRVLSLEDGIATGLLVLKDLGIQVDRY
IASEVCEDSITVGMVRHQGKIMYVGDVRSVTQKHIQEWGPEDLVIGGSPC
NDLSIVNPARKGLYEGTGRLFFEFYRLLHDARPKEGDDRPFFWLFENVVA
MGVSDKRDISRFLESNPVMIDAKEVSAAHRARYFWGNLPGMNRPLASTVN
DKLELQECLEHGRIAKESKVRTITTRSNSIKQGKDQHFPVEMNEKEDILW
CTEMERVEGFPVHYTDVSNMSRLARQRLLGRSWSVPVIRHLFAPLKEYFA
CVSSGNSNANSRGPSFSSGLVPLSLRGSHMGPMEIYKTVSAWKRQPVRVL
SLERNIDKVLKSLGFLESGSGSGGGTLKYVEDVINVVRRDVEKWGPEDLV
YGSTQPLGSSCDRCPGWYMFQFHRILQYALPRQESQRPFFWIEMDNLLLT
EDDQETTTRELQTEAVTLQDVRGRDYQNAMRVWSNIPGLKSKHAPLTPKE
EEYLQAQVRSRSKLDAPKVDLLVKNCLLPLREYFKYFSQNSLPLGGPSSG
APPPSGGSPAGSPTSTEEGTSESATPESGPGTSTEPSEGSAPGSPAGSPT
STEEGTSTEPSEGSAPGTSTEPSEPKKKRKVYMDKKYSIGLAIGTNSVGW
AVITDEYKVPSKKFKVLGNTDRHSIKKNLIGALLEDSGETAEATRLKRTA
RRRYTRRKNRICYLQEIFSNEMAKVDDSFFHRLEESFLVEEDKKHERHPI
FGNIVDEVAYHEKYPTIYHLRKKLVDSTDKADLRLIYLALAHMIKERGHF
LIEGDLNPDNSDVDKLFIQLVQTYNQLFEENPINASGVDAKAILSARLSK
SRRLENLIAQLPGEKKNGLEGNLIALSLGLTPNEKSNEDLAEDAKLQLSK
DTYDDDLDNLLAQIGDQYADLFLAAKNLSDAILLSDILRVNTEITKAPLS
ASMIKRYDEHHQDLTLLKALVRQQLPEKYKEIFFDQSKNGYAGYIDGGAS
QEEFYKFIKPILEKMDGTEELLVKLNREDLLRKQRTEDNGSIPHQIHLGE
LHAILRRQEDFYPFLKDNREKIEKILTFRIPYYVGPLARGNSRFAWMTRK
SEETITPWNFEEVVDKGASAQSFIERMTNEDKNLPNEKVLPKHSLLYEYF
TVYNELTKVKYVTEGMRKPAFLSGEQKKAIVDLLFKTNRKVTVKQLKEDY
FKKIECFDSVEISGVEDRENASLGTYHDLLKIIKDKDELDNEENEDILED
IVLTLTLFEDREMIEERLKTYAHLEDDKVMKQLKRRRYTGWGRLSRKLIN
GIRDKQSGKTILDELKSDGFANRNEMQLIHDDSLTEKEDIQKAQVSGQGD
SLHEHIANLAGSPAIKKGILQTVKVVDELVKVMGRHKPENIVIEMARENQ
TTQKGQKNSRERMKRIEEGIKELGSQILKEHPVENTQLQNEKLYLYYLQN
GRDMYVDQELDINRLSDYDVDAIVPQSFLKDDSIDNKVLTRSDKNRGKSD
NVPSEEVVKKMKNYWRQLLNAKLITQRKEDNLTKAERGGLSELDKAGFIK
RQLVETRQITKHVAQILDSRMNTKYDENDKLIREVKVITLKSKLVSDERK
DFQFYKVREINNYHHAHDAYLNAVVGTALIKKYPKLESEFVYGDYKVYDV
RKMIAKSEQEIGKATAKYFFYSNIMNFFKTEITLANGEIRKRPLIETNGE
TGEIVWDKGRDFATVRKVLSMPQVNIVKKTEVQTGGFSKESILPKRNSDK
LIARKKDWDPKKYGGFDSPTVAYSVLVVAKVEKGKSKKLKSVKELLGITI
MERSSFEKNPIDFLEAKGYKEVKKDLIIKLPKYSLFELENGRKRMLASAG
ELQKGNELALPSKYVNFLYLASHYEKLKGSPEDNEQKQLFVEQHKHYLDE
IIEQISEFSKRVILADANLDKVLSAYNKHRDKPIREQAENIIHLETLTNL
GAPAAFKYFDTTIDRKRYTSTKEVLDATLIHQSITGLYETRIDLSQLGGD
PKKKRKVSGSETPGTSESATPESTGRTLVTFKDVFVDFTREEWKLLDTAQ
QIVYRNVMLENYKNLVSLGYQLTKPDVILRLEKGEEP

[0188] In particular embodiments, a fusion construct described herein may have Configuration 2 and comprise SEQ ID NOS: 1081 and 1248-1249, or a sequence at least 75%, 80%, 85%, 90%, 91%, 92%, 93%, 94%, 95%, 96%, 97%, 98%, or 99% identical thereto. In SEQ ID NOS: 1081 and 1248-1249 below, the XTEN linkers are underlined, the NLS sequences are bolded and underlined, the DNMT3A sequence is italicized, the DNMT3L sequence is underlined and italicized, the ZFP domain is bolded, and the KOX1 KRAB domain is underlined and bolded. Variable amino acids represented by Xs are the amino acids of the DNA-recognition helix of the zinc finger and XX in italics may be either TR, LR or LK.

(SEQ ID NOS: 1081 and 1248-1249, respectively,
in order of appearance)
MNHDQEFDPPKVYPPVPAEKRKPIRVLSLEDGIATGLLVLKDLGIQVDRY
IASEVCEDSITVGMVRHQGKIMYVGDVRSVTQKHIQEWGPFDLVIGGSPC
NDLSIVNPARKGLYEGTGRLFFEFYRLLHDARPKEGDDRPFFWLFENVVA
MGVSDKRDISRELESNPVMIDAKEVSAAHRARYFWGNLPGMNRPLASTVN
DKLELQECLEHGRIAKFSKVRTITTRSNSIKQGKDQHFPVFMNEKEDILW
CTEMERVFGFPVHYTDVSNMSRLARQRLLGRSWSVPVIRHLFAPLKEYFA
CVSSGNSNANSRGPSFSSGLVPLSLRGSHMGPMEIYKTVSAWKRQPVRVL
SLFRNIDKVLKSLGFLESGSGSGGGTLKYVEDVTNVVRRDVEKWGPEDLV
YGSTQPLGSSCDRCPGWYMFQFHRILQYALPRQESQRPFFWIEMDNLLLT
EDDQETTTRFLQTEAVTLQDVRGRDYQNAMRVWSNIPGLKSKHAPLTPKE
EEYLQAQVRSRSKLDAPKVDLLVKNCLLPLREYFKYFSQNSLPLGGPSSG
APPPSGGSPAGSPTSTEEGTSESATPESGPGTSTEPSEGSAPGSPAGSPT
STEEGTSTEPSEGSAPGTSTEPSEPKKKRKVYSRPGERPFQCRICMRNFS
XXXXXXXHXXTHTGEKPFQCRICMRNFSXXXXXXXHXXTH[linker]PF
QCRICMRNFSXXXXXXXHXXTHTGEKPFQCRICMRNFSXXXXXXXHXXTH
[linker]PFQCRICMRNFSXXXXXXXHXXTHTGEKPFQCRICMRNFSXX
XXXXXHXXTHLRGSPKKKRKVSGSETPGTSESATPESTGRTLVTFKDVFV
DFTREEWKLLDTAQQIVYRNVMLENYKNLVSLGYQLTKPDVILRLEKGEE
P

In certain embodiments, the six “XXXXXXX” regions in SEQ ID NOS: 1081 and 1248-1249 comprise, in order, the F1-F6 amino acid sequences shown in Table 1. [linker] represents a linker sequence. In some embodiments, one or both linker sequences may be TGSQKP (SEQ ID NO: 1085). In some embodiments, one or both linker sequences may be TGGGGSQKP (SEQ ID NO: 1086). In some embodiments, one linker sequence may have the amino acid sequence of SEQ ID NO: 1085 and the other linker sequence may have the amino acid sequence of SEQ ID NO: 1086.

[0189] Multiple epigenetic editors may be used to effect activation or repression of a target gene or multiple target genes. For example, an epigenetic editor fusion protein comprising a DNA-binding domain (e.g., a dCas9 domain) and an effector domain may be co-delivered with two or more guide polynucleotides (e.g., gRNAs), each targeting a different target DNA sequence. The target sites for two of the DNA-binding domains may be the same or in the vicinity of each other, or separated by, for example, about 100 base pairs, about 200 base pairs, about 300 base pairs, about 400 base pairs, about 500 base pairs, or about 600 or more base pairs. In addition, when targeting double-strand DNA, such as an endogenous gene locus, the guide polynucleotides may target the same or different strands (one or more to the positive strand and/or one or more to the negative strand).

### V. Target Sequences

[0190] An epigenetic editor herein may be directed to an HBV target sequence to effect epigenetic modification of HBV or an HBV gene. As used herein, a “target sequence,” a “target site,” or a “target region” is a nucleic acid sequence present in a genome or gene of interest, e.g., in an HBV genome or an HBV gene; in some instances, the target sequence may be outside but in the vicinity of the gene of interest wherein methylation or binding by a repressor of the target sequence represses expression of the gene. In some embodiments, the target sequence may be a hypomethylated or hypermethylated nucleic acid sequence.

[0191] The target sequence may be in any part of a target gene. In some embodiments, the target sequence is part of or near a noncoding sequence of the gene. In some embodiments, the target sequence is part of an exon of the gene. In some embodiments, the target sequence is part of or near a transcriptional regulatory sequence of the gene, such as a promoter or an enhancer. In some embodiments, the target sequence is adjacent to, overlaps with, or encompasses a CpG island, e.g., a CpG island identified within the HBV genome. In some embodiments, the target sequence is outside of a CpG island. In certain embodiments, the target sequence is within about 3000, 2900, 2800, 2700, 2600, 2500, 2400, 2300, 2200, 2100, 2000, 1900, 1800, 1700, 1600, 1500, 1400, 1300, 1200, 1100, 1000, 900, 800, 700, 600, 500, 400, 300, 200, or 100 base pairs (bp) flanking an HBV TSS. In certain embodiments, the target sequence is within 500 bp flanking the HBV TSS. In certain embodiments, the target sequence is within 1000 bp flanking the HBV TSS.

[0192] In some embodiments, the target sequence may hybridize to a guide polynucleotide sequence (e.g., gRNA) complexed with a fusion protein comprising a polynucleotide guided DNA-binding domain (e.g., a CRISPR protein such as dCas9) and effector domain(s). The guide polynucleotide sequence may be designed to have complementarity to the target sequence, or identity to the opposing strand of the target sequence. In some embodiments, the guide polynucleotide comprises a spacer sequence that is about 80%, 85%, 90%, 91%, 92%, 93%, 94%, 95%, 96%, 97%, 98% or 99% identical to a protospacer sequence in the target sequence. In particular embodiments, the guide polynucleotide comprises a spacer sequence that is 100% identical to a protospacer sequence in the target sequence.

[0193] In some embodiments, where the DNA-binding domain of an epigenetic editor described herein is a zinc finger array, the target sequence may be recognized by said zinc finger array.

[0194] In some embodiments, where the DNA-binding domain of an epigenetic editor described herein is a TALE, the target sequence may be recognized by said TALE.

[0195] A target sequence described herein may be specific to one genotype of HBV, to one copy of am HBV target gene, or may be specific to one allele of an HBV target gene. In some embodiments, however, the target sequence may be conserved across two or more HBV genotypes, across two or more copies of an HBV gene, and across alleles of an HBV gene. Accordingly, the epigenetic modification and modulation of expression thereof may be specific to one copy or one allele of the target gene, or, in other embodiments, may be universal to different HBV genotypes, or HBV gene copies or alleles

[0196] In some embodiments, the target sequence is comprised in the following sequence:

>NC_003977.2 Hepatitis B virus (strain ayw) genome
(SEQ ID NO. 1082)
AATTCCACAACCTTCCACCAAACTCTGCAAGATCCCAGAGTGAGAGGCCT
GTATTTCCCTGCTGGTGGCTCCAGTTCAGGAACAGTAAACCCTGTTCTGA
CTACTGCCTCTCCCTTATCGTCAATCTTCTCGAGGATTGGGGACCCTGCG
CTGAACATGGAGAACATCACATCAGGATTCCTAGGACCCCTTCTCGTGTT
ACAGGCGGGGTTTTTCTTGTTGACAAGAATCCTCACAATACCGCAGAGTC
TAGACTCGTGGTGGACTTCTCTCAATTTTCTAGGGGGAACTACCGTGTGT
CTTGGCCAAAATTCGCAGTCCCCAACCTCCAATCACTCACCAACCTCTTG
TCCTCCAACTTGTCCTGGTTATCGCTGGATGTGTCTGCGGCGTTTTATCA
TCTTCCTCTTCATCCTGCTGCTATGCCTCATCTTCTTGTTGGTTCTTCTG
GACTATCAAGGTATGTTGCCCGTTTGTCCTCTAATTCCAGGATCCTCAAC
AACCAGCACGGGACCATGCCGGACCTGCATGACTACTGCTCAAGGAACCT
CTATGTATCCCTCCTGTTGCTGTACCAAACCTTCGGACGGAAATTGCACC
TGTATTCCCATCCCATCATCCTGGGCTTTCGGAAAATTCCTATGGGAGTG
GGCCTCAGCCCGTTTCTCCTGGCTCAGTTTACTAGTGCCATTTGTTCAGT
GGTTCGTAGGGCTTTCCCCCACTGTTTGGCTTTCAGTTATATGGATGATG
TGGTATTGGGGGCCAAGTCTGTACAGCATCTTGAGTCCCTTTTTACCGCT
GTTACCAATTTTCTTTTGTCTTTGGGTATACATTTAAACCCTAACAAAAC
AAAGAGATGGGGTTACTCTCTAAATTTTATGGGTTATGTCATTGGATGTT
ATGGGTCCTTGCCACAAGAACACATCATACAAAAAATCAAAGAATGTTTT
AGAAAACTTCCTATTAACAGGCCTATTGATTGGAAAGTATGTCAACGAAT
TGTGGGTCTTTTGGGTTTTGCTGCCCCTTTTACACAATGTGGTTATCCTG
CGTTGATGCCTTTGTATGCATGTATTCAATCTAAGCAGGCTTTCACTTTC
TCGCCAACTTACAAGGCCTTTCTGTGTAAACAATACCTGAACCTTTACCC
CGTTGCCCGGCAACGGCCAGGTCTGTGCCAAGTGTTTGCTGACGCAACCC
CCACTGGCTGGGGCTTGGTCATGGGCCATCAGCGCATGCGTGGAACCTTT
TCGGCTCCTCTGCCGATCCATACTGCGGAACTCCTAGCCGCTTGTTTTGC
TCGCAGCAGGTCTGGAGCAAACATTATCGGGACTGATAACTCTGTTGTCC
TATCCCGCAAATATACATCGTTTCCATGGCTGCTAGGCTGTGCTGCCAAC
TGGATCCTGCGCGGGACGTCCTTTGTTTACGTCCCGTCGGCGCTGAATCC
TGCGGACGACCCTTCTCGGGGTCGCTTGGGACTCTCTCGTCCCCTTCTCC
GTCTGCCGTTCCGACCGACCACGGGGCGCACCTCTCTTTACGCGGACTCC
CCGTCTGTGCCTTCTCATCTGCCGGACCGTGTGCACTTCGCTTCACCTCT
GCACGTCGCATGGAGACCACCGTGAACGCCCACCAAATATTGCCCAAGGT
CTTACATAAGAGGACTCTTGGACTCTCAGCAATGTCAACGACCGACCTTG
AGGCATACTTCAAAGACTGTTTGTTTAAAGACTGGGAGGAGTTGGGGGAG
GAGATTAGGTTAAAGGTCTTTGTACTAGGAGGCTGTAGGCATAAATTGGT
CTGCGCACCAGCACCATGCAACTTTTTCACCTCTGCCTAATCATCTCTTG
TTCATGTCCTACTGTTCAAGCCTCCAAGCTGTGCCTTGGGTGGCTTTGGG
GCATGGACATCGACCCTTATAAAGAATTTGGAGCTACTGTGGAGTTACTC
TCGTTTTTGCCTTCTGACTTCTTTCCTTCAGTACGAGATCTTCTAGATAC
CGCCTCAGCTCTGTATCGGGAAGCCTTAGAGTCTCCTGAGCATTGTTCAC
CTCACCATACTGCACTCAGGCAAGCAATTCTTTGCTGGGGGGAACTAATG
ACTCTAGCTACCTGGGTGGGTGTTAATTTGGAAGATCCAGCGTCTAGAGA
CCTAGTAGTCAGTTATGTCAACACTAATATGGGCCTAAAGTTCAGGCAAC
TCTTGTGGTTTCACATTTCTTGTCTCACTTTTGGAAGAGAAACAGTTATA
GAGTATTTGGTGTCTTTCGGAGTGTGGATTCGCACTCCTCCAGCTTATAG
ACCACCAAATGCCCCTATCCTATCAACACTTCCGGAGACTACTGTTGTTA
GACGACGAGGCAGGTCCCCTAGAAGAAGAACTCCCTCGCCTCGCAGACGA
AGGTCTCAATCGCCGCGTCGCAGAAGATCTCAATCTCGGGAATCTCAATG
TTAGTATTCCTTGGACTCATAAGGTGGGGAACTTTACTGGGCTTTATTCT
TCTACTGTACCTGTCTTTAATCCTCATTGGAAAACACCATCTTTTCCTAA
TATACATTTACACCAAGACATTATCAAAAAATGTGAACAGTTTGTAGGCC
CACTCACAGTTAATGAGAAAAGAAGATTGCAATTGATTATGCCTGCCAGG
TTTTATCCAAAGGTTACCAAATATTTACCATTGGATAAGGGTATTAAACC
TTATTATCCAGAACATCTAGTTAATCATTACTTCCAAACTAGACACTATT
TACACACTCTATGGAAGGCGGGTATATTATATAAGAGAGAAACAACACAT
AGCGCCTCATTTTGTGGGTCACCATATTCTTGGGAACAAGATCTACAGCA
TGGGGCAGAATCTTTCCACCAGCAATCCTCTGGGATTCTTTCCCGACCAC
CAGTTGGATCCAGCCTTCAGAGCAAACACCGCAAATCCAGATTGGGACTT
CAATCCCAACAAGGACACCTGGCCAGACGCCAACAAGGTAGGAGCTGGAG
CATTCGGGCTGGGTTTCACCCCACCGCACGGAGGCCTTTTGGGGTGGAGC
CCTCAGGCTCAGGGCATACTACAAACTTTGCCAGCAAATCCGCCTCCTGC
CTCCACCAATCGCCAGTCAGGAAGGCAGCCTACCCCGCTGTCTCCACCTT
TGAGAAACACTCATCCTCAGGCCATGCAGTGG

[0197] In some embodiments, the target sequence is comprised in the following sequence:

>U95551.1 Hepatitis B virus subtype ayw, complete
genome
(SEQ ID No. 1083)
AATTCCACAACCTTTCACCAAACTCTGCAAGATCCCAGAGTGAGAGGCCT
GTATTTCCCTGCTGGTGGCTCCAGTTCAGGAGCAGTAAACCCTGTTCCGA
CTACTGCCTCTCCCTTATCGTCAATCTTCTCGAGGATTGGGGACCCTGCG
CTGAACATGGAGAACATCACATCAGGATTCCTAGGACCCCTTCTCGTGTT
ACAGGCGGGGTTTTTCTTGTTGACAAGAATCCTCACAATACCGCAGAGTC
TAGACTCGTGGTGGACTTCTCTCAATTTTCTAGGGGGAACTACCGTGTGT
CTTGGCCAAAATTCGCAGTCCCCAACCTCCAATCACTCACCAACCTCCTG
TCCTCCAACTTGTCCTGGTTATCGCTGGATGTGTCTGCGGCGTTTTATCA
TCTTCCTCTTCATCCTGCTGCTATGCCTCATCTTCTTGTTGGTTCTTCTG
GACTATCAAGGTATGTTGCCCGTTTGTCCTCTAATTCCAGGATCCTCAAC
CACCAGCACGGGACCATGCCGAACCTGCATGACTACTGCTCAAGGAACCT
CTATGTATCCCTCCTGTTGCTGTACCAAACCTTCGGACGGAAATTGCACC
TGTATTCCCATCCCATCATCCTGGGCTTTCGGAAAATTCCTATGGGAGTG
GGCCTCAGCCCGTTTCTCCTGGCTCAGTTTACTAGTGCCATTTGTTCAGT
GGTTCGTAGGGCTTTCCCCCACTGTTTGGCTTTCAGTTATATGGATGATG
TGGTATTGGGGGCCAAGTCTGTACAGCATCTTGAGTCCCTTTTTACCGCT
GTTACCAATTTTCTTTTGTCTTTGGGTATACATTTAAACCCTAACAAAAC
AAAGAGATGGGGTTACTCTCTGAATTTTATGGGTTATGTCATTGGAAGTT
ATGGGTCCTTGCCACAAGAACACATCATACAAAAAATCAAAGAATGTTTT
AGAAAACTTCCTATTAACAGGCCTATTGATTGGAAAGTATGTCAACGAAT
TGTGGGTCTTTTGGGTTTTGCTGCCCCATTTACACAATGTGGTTATCCTG
CGTTAATGCCCTTGTATGCATGTATTCAATCTAAGCAGGCTTTCACTTTC
TCGCCAACTTACAAGGCCTTTCTGTGTAAACAATACCTGAACCTTTACCC
CGTTGCCCGGCAACGGCCAGGTCTGTGCCAAGTGTTTGCTGACGCAACCC
CCACTGGCTGGGGCTTGGTCATGGGCCATCAGCGCGTGCGTGGAACCTTT
TCGGCTCCTCTGCCGATCCATACTGCGGAACTCCTAGCCGCTTGTTTTGC
TCGCAGCAGGTCTGGAGCAAACATTATCGGGACTGATAACTCTGTTGTCC
TCTCCCGCAAATATACATCGTATCCATGGCTGCTAGGCTGTGCTGCCAAC
TGGATCCTGCGCGGGACGTCCTTTGTTTACGTCCCGTCGGCGCTGAATCC
TGCGGACGACCCTTCTCGGGGTCGCTTGGGACTCTCTCGTCCCCTTCTCC
GTCTGCCGTTCCGACCGACCACGGGGCGCACCTCTCTTTACGCGGACTCC
CCGTCTGTGCCTTCTCATCTGCCGGACCGTGTGCACTTCGCTTCACCTCT
GCACGTCGCATGGAGACCACCGTGAACGCCCACCGAATGTTGCCCAAGGT
CTTACATAAGAGGACTCTTGGACTCTCTGCAATGTCAACGACCGACCTTG
AGGCATACTTCAAAGACTGTTTGTTTAAAGACTGGGAGGAGTTGGGGGAG
GAGATTAGATTAAAGGTCTTTGTACTAGGAGGCTGTAGGCATAAATTGGT
CTGCGCACCAGCACCATGCAACTTTTTCACCTCTGCCTAATCATCTCTTG
TTCATGTCCTACTGTTCAAGCCTCCAAGCTGTGCCTTGGGTGGCTTTGGG
GCATGGACATCGACCCTTATAAAGAATTTGGAGCTACTGTGGAGTTACTC
TCGTTTTTGCCTTCTGACTTCTTTCCTTCAGTACGAGATCTTCTAGATAC
CGCCTCAGCTCTGTATCGGGAAGCCTTAGAGTCTCCTGAGCATTGTTCAC
CTCACCATACTGCACTCAGGCAAGCAATTCTTTGCTGGGGGGAACTAATG
ACTCTAGCTACCTGGGTGGGTGTTAATTTGGAAGATCCAGCATCTAGAGA
CCTAGTAGTCAGTTATGTCAACACTAATATGGGCCTAAAGTTCAGGCAAC
TCTTGTGGTTTCACATTTCTTGTCTCACTTTTGGAAGAGAAACCGTTATA
GAGTATTTGGTGTCTTTCGGAGTGTGGATTCGCACTCCTCCAGCTTATAG
ACCACCAAATGCCCCTATCCTATCAACACTTCCGGAAACTACTGTTGTTA
GACGACGAGGCAGGTCCCCTAGAAGAAGAACTCCCTCGCCTCGCAGACGA
AGGTCTCAATCGCCGCGTCGCAGAAGATCTCAATCTCGGGAACCTCAATG
TTAGTATTCCTTGGACTCATAAGGTGGGGAACTTTACTGGTCTTTATTCT
TCTACTGTACCTGTCTTTAATCCTCATTGGAAAACACCATCTTTTCCTAA
TATACATTTACACCAAGACATTATCAAAAAATGTGAACAGTTTGTAGGCC
CACTTACAGTTAATGAGAAAAGAAGATTGCAATTGATTATGCCTGCTAGG
TTTTATCCAAAGGTTACCAAATATTTACCATTGGATAAGGGTATTAAACC
TTATTATCCAGAACATCTAGTTAATCATTACTTCCAAACTAGACACTATT
TACACACTCTATGGAAGGCGGGTATATTATATAAGAGAGAAACAACACAT
AGCGCCTCATTTTGTGGGTCACCATATTCTTGGGAACAAGATCTACAGCA
TGGGGCAGAATCTTTCCACCAGCAATCCTCTGGGATTCTTTCCCGACCAC
CAGTTGGATCCAGCCTTCAGAGCAAACACAGCAAATCCAGATTGGGACTT
CAATCCCAACAAGGACACCTGGCCAGACGCCAACAAGGTAGGAGCTGGAG
CATTCGGGCTGGGTTTCACCCCACCGCACGGAGGCCTTTTGGGGTGGAGC
CCTCAGGCTCAGGGCATACTACAAACTTTGCCAGCAAATCCGCCTCCTGC
CTCCACCAATCGCCAGACAGGAAGGCAGCCTACCCCGCTGTCTCCACCTT
TGAGAAACACTCATCCTCAGGCCATGCAGTGG

### VI. Epigenetic Modifications

[0198] An epigenetic editor described herein may perform sequence-specific epigenetic modification(s) (e.g., alteration of chemical modification(s)) of a target gene that harbors the target sequence. Such epigenetic modulation may be safer and more easily reversible than modulation due to gene editing, e.g., with generation of DNA double-strand breaks. In some embodiments, the epigenetic modulation may reduce or silence the target gene. In some embodiments, the modification is at a specific site of the target sequence. In some embodiments, the modification is at a specific allele of the target gene. Accordingly, the epigenetic modification may result in modulated (e.g., reduced) expression of one copy of a target gene harboring a specific allele, and not the other copy of the target gene. In some embodiments, the specific allele is associated with a disease, condition, or disorder.

[0199] In some embodiments, the epigenetic modification reduces or abolishes transcription of the target gene harboring the target sequence. In some embodiments, the epigenetic modification reduces or abolishes transcription of a copy of the target gene harboring a specific allele recognized by the epigenetic editor. In some embodiments, the epigenetic editor reduces the level of or eliminates expression of a protein encoded by the target gene. In some embodiments, the epigenetic editor reduces the level of or eliminates expression of a protein encoded by a copy of the target gene harboring a specific allele recognized by the epigenetic editor. The target HBV gene may be epigenetically modified in vitro, ex vivo, or in vivo.

[0200] The effector domain of an epigenetic editor described herein may alter (e.g., deposit or remove) a chemical modification at a nucleotide of the target gene or at a histone associated with the target gene. The chemical modification may be altered at a single nucleotide or a single histone, or may be altered at 2, 3, 4, 5, 6, 7, 8, 9, 10, 11, 12, 13, 14, 15, 16, 17, 18, 19, 20, 30, 40, 50, 60, 70, 80, 90, 100, 200, 300, 400, 500, 600, 700, 800, 900, 1000, 1500, 2000, 2500, 3000 or more nucleotides.

[0201] In some embodiments, an effector domain of an epigenetic editor described herein may alter a CpG dinucleotide within the target gene. In some embodiments, all CpG dinucleotides within 2000, 1500, 1000, 500, or 200 bps flanking a target sequence (e.g., in an alteration site as described herein) are altered according to a modification type described herein, as compared to the original state of the gene or the gene in a comparable cell not contacted with the epigenetic editor. In some embodiments, at least 1, 2, 3, 4, 5, 6, 7, 8, 9, 10, 11, 12, 13, 14, 15, 16, 17, 18, 19, 20, 25, 30, 35, 40, 45, 50, 60, 70, 80, 90, 100, 150, 200, 250, 300, 350, 400, 450, 500, 550, 600, 650, 700 or more of the CpG dinucleotides are altered as compared to the original state of the gene or the gene in a comparable cell not contacted with the epigenetic editor. In some embodiments, at least 5%, 6%, 7%, 8%, 9%, 10%, 15%, 20%, 25%, 30%, 35%, 40%, 45%, 50%, 55%, 60%, 65%, 70%, 75%, 80%, 85%, 90%, 95%, 96%, 97%, 98%, or 99% of the CpG dinucleotides are altered as compared to the original state of the gene or the gene in a comparable cell not contacted with the epigenetic editor. In some embodiments, one single CpG dinucleotide is altered, as compared to the original state of the gene or the gene in a comparable cell not contacted with the epigenetic editor.

[0202] An effector domain of an epigenetic editor described herein may alter a histone modification state of a histone associated with or bound to the target gene. For example, an effector domain may deposit a modification on one or more lysine residues of histone tails of histones associated with the target gene. In some embodiments, the effector domain may result in deacetylation of one or more histone tails of histones associated with the target gene, thereby reducing or silencing expression of the target gene. In some embodiments, the histone modification state is a methylation state. For example, the effector domain may result in a H3K9, H3K27 or H4K20 methylation (e.g. one or more of a H3K9me2, H3K9me3, H3K27me2, H3K27me3, and H4K20me3 methylation) at one or more histone tails associated with the target gene, thereby reducing or silencing expression of the target gene.

[0203] In some embodiments, all histone tails of histones bound to DNA nucleotides within 2000, 1500, 1000, 500, or 200 bps flanking the target sequence are altered according to a modification type as described herein, as compared to the original state of the chromosome or the chromosome in a comparable cell not contacted with the epigenetic editor. In some embodiments, at least 1, 2, 3, 4, 5, 6, 7, 8, 9, 10, 11, 12, 13, 14, 15, 16, 17, 18, 19, 20, 25, 30, 35, 40, 45, 50, 55, 60, 65, 70, 75, 80, 85, 90, 95, 100, 105, 110, 115, 120 or more histone tails of the bound histones are altered as compared to the original state of the chromosome or the chromosome in a comparable cell not contacted with the epigenetic editor. In some embodiments, at least 5%, 6%, 7%, 8%, 9%, 10%, 15%, 20%, 25%, 30%, 35%, 40%, 45%, 50%, 55%, 60%, 65%, 70%, 75%, 80%, 85%, 90%, 95%, 96%, 97%, 98%, or 99% of histone tails of the bound histones are altered as compared to the original state of the chromosome or the chromosome in a comparable cell not contacted with the epigenetic editor. For example, one single histone tail of the bound histones may be altered as compared to the original state of the chromosome or the chromosome in a comparable cell not contacted with the epigenetic editor. As another example, one single bound histone octamer may be altered as compared to the original state of the chromosome or the chromosome in a comparable cell not contacted with the epigenetic editor.

[0204] The chemical modification deposited at target gene DNA nucleotides or histone residues may be at or in close proximity to a target sequence in the target gene. In some embodiments, an effector domain of an epigenetic editor described herein alters a chemical modification state of a nucleotide or histone tail bound to a nucleotide 100-200, 200-300, 300-400, 400-55, 500-600, 600-700, or 700-800 nucleotides 5′ or 3′ to the target sequence in the target gene. In some embodiments, an effector domain alters a chemical modification state of a nucleotide or histone tail bound to a nucleotide within 10, 20, 30, 40, 50, 60, 70, 80, 90, 100, 200, 300, 400, 500, 600, 700, 800, 900, 1000, 1100, 1200, 1300, 1400, 1500, 1600, 1700, 1800, 1900, or 2000 nucleotides flanking the target sequence. As used herein, “flanking” refers to nucleotide positions 5′ to the 5′ end of and 3′ to the 3′ end of a particular sequence, e.g. a target sequence.

[0205] In some embodiments, an effector domain mediates or induces a chemical modification change of a nucleotide or a histone tail bound to a nucleotide distant from a target sequence. Such modification may be initiated near the target sequence, and may subsequently spread to one or more nucleotides in the target gene distant from the target sequence. For example, an effector domain may initiate alteration of a chemical modification state of one or more nucleotides or one or more histone residues bound to one or more nucleotides within 10, 20, 30, 40, 50, 60, 70, 80, 90, 100, 200, 300, 400, 500 nucleotides flanking the target sequence, and the chemical modification state alteration may spread to one or more nucleotides at least 100, 200, 300, 400, 500, 600, 700, 800, 900, 1000, 1100, 1200, 1300, 1400, 1500, 1600, 1700, 1800, 1900, 2000, 2500, 3000, or more nucleotides from the target sequence in the target gene, either upstream or downstream of the target sequence. In certain embodiments, the chemical modification may be initiated at less than 2, 3, 5, 10, 20, 30, 40, 50, or 100 nucleotides in the target gene and spread to at least 100, 200, 300, 400, 500, 600, 700, 800, 900, 1000, 2000, or more nucleotides in the target gene. In some embodiments, the chemical modification spreads to nucleotides in the entire target gene. Additional proteins or transcription factors, for example, transcription repressors, methyltransferases, or transcription regulation scaffold proteins, may be involved in the spreading of the chemical modification. Alternatively, the epigenetic editor alone may be involved.

[0206] In some embodiments, an epigenetic editor described herein reduces expression of a target gene by at least about 20%, at least about 30%, at least about 40%, at least about 50%, at least about 60%, at least about 70%, at least about 80%, at least about 90%, at least about 95%, at least about 99%, or more, as measured by transcription of the target gene in a cell, a tissue, or a subject as compared to a control cell, control tissue, or a control subject (e.g., in the absence of the epigenetic editor). In some embodiments, the epigenetic editors described herein reduces expression of a copy of target gene by at least about 20%, at least about 30%, at least about 40%, at least about 50%, at least about 60%, at least about 70%, at least about 80%, at least about 90%, at least about 95%, at least about 99%, or more, as measured by transcription of the copy of the target gene in a cell, a tissue, or a subject as compared to a control cell, control tissue, or a control subject. In certain embodiments, the copy of the target gene harbors a specific sequence or allele recognized by the epigenetic editor. In particular embodiments, the epigenetically modified copy encodes a functional protein, and accordingly an epigenetic editor disclosed herein may reduce or abolish expression and/or function of the protein. For example, an epigenetic editor described herein may reduce expression and/or function of a protein encoded by the target gene by at least 3-fold, at least 4-fold, at least 5-fold, at least 6-fold, at least 7-fold, at least 8-fold, at least 9-fold, at least 10-fold, at least 11-fold, at least 12-fold, at least 13-fold, at least 14-fold, at least 15-fold, at least 20-fold, at least 25-fold, at least 30-fold, at least 35-fold, at least 40-fold, at least 45-fold, at least 50-fold, at least 60-fold, at least 70-fold, at least 80-fold, at least 90-fold, or at least 100 fold in a cell, a tissue, or a subject as compared to a control cell, control tissue, or a control subject.

[0207] Modulation of target gene expression can be assayed by determining any parameter that is indirectly or directly affected by the expression of the target gene. Such parameters include, e.g., changes in RNA or protein levels; changes in protein activity; changes in product levels; changes in downstream gene expression; changes in transcription or activity of reporter genes such as, for example, luciferase, CAT, beta-galactosidase, or GFP; changes in signal transduction; changes in phosphorylation and dephosphorylation; changes in receptor-ligand interactions; changes in concentrations of second messengers such as, for example, cGMP, cAMP, IP3, and Ca2⁺; changes in cell growth; changes in neovascularization; and/or changes in any functional effect of gene expression. Measurements can be made in vitro, in vivo, and/or ex vivo, and can be made by conventional methods, e.g., measurement of RNA or protein levels, measurement of RNA stability, and/or identification of downstream or reporter gene expression. Readout can be by way of, for example, chemiluminescence, fluorescence, colorimetric reactions, antibody binding, inducible markers, ligand binding assays, changes in intracellular second messengers such as cGMP and inositol triphosphate (IP3), changes in intracellular calcium levels; cytokine release, and the like.

[0208] Methods for determining the expression level of a gene, for example the target of an epigenetic editor, may include, e.g., determining the transcript level of a gene by reverse transcription PCR, quantitative RT-PCR, droplet digital PCR (ddPCR), Northern blot, RNA sequencing, DNA sequencing (e.g., sequencing of complementary deoxyribonucleic acid (cDNA) obtained from RNA); next generation (Next-Gen) sequencing, nanopore sequencing, pyrosequencing, or Nanostring sequencing. Levels of protein expressed from a gene may be determined, e.g., by Western blotting, enzyme linked immuno-absorbance assays, mass-spectrometry, immunohistochemistry, or flow cytometry analysis. Gene expression product levels may be normalized to an internal standard such as total messenger ribonucleic acid (mRNA) or the expression level of a particular gene, e.g., a housekeeping gene.

[0209] In some embodiments, the effect of an epigenetic editor in modulating target gene expression may be examined using a reporter system. For example, an epigenetic editor may be designed to target a reporter gene encoding a reporter protein, such as a fluorescent protein. Expression of the reporter gene in such a model system may be monitored by, e.g., flow cytometry, fluorescence-activated cell sorting (FACS), or fluorescence microscopy. In some embodiments, a population of cells may be transfected with a vector that harbors a reporter gene. The vector may be constructed such that the reporter gene is expressed when the vector transfects a cell. Suitable reporter genes include genes encoding fluorescent proteins, for example green, yellow, cherry, cyan or orange fluorescent proteins. The population of cells carrying the reporter system may be transfected with DNA, mRNA, or vectors encoding the epigenetic editor targeting the reporter gene.

### VII. Pharmaceutical Compositions

[0210] Another aspect of the present disclosure is a pharmaceutical composition comprising as an active ingredient (or as the sole active ingredient) one or more epigenetic editors described herein or component(s) (e.g., fusion proteins and/or guide polynucleotides) thereof, or nucleic acid molecule(s) encoding said epigenetic editors or component(s) thereof. For example, a pharmaceutical composition may comprise nucleic acid molecule(s) encoding the fusion protein(s) (and guide polynucleotides, where applicable) of an epigenetic editor described herein. In some embodiments, separate pharmaceutical compositions comprise the fusion protein(s) and the guide polynucleotide(s). In some embodiments, multiple pharmaceutical compositions, each comprising one epigenetic editor, are administered simultaneously. A pharmaceutical composition may also comprise cells that have undergone epigenetic modification(s) mediated or induced by an epigenetic editor provided herein.

[0211] Generally, the epigenetic editors described herein or component(s) thereof, or nucleic acid molecule(s) encoding said epigenetic editors or component(s) thereof, of the present disclosure are suitable to be administered as a formulation in association with one or more pharmaceutically acceptable excipient(s), e.g., as described below.

[0212] The term “excipient” is used herein to describe any ingredient other than the compound(s) of the present disclosure. The choice of excipient(s) will to a large extent depend on factors such as the particular mode of administration, the effect of the excipient on solubility and stability, and the nature of the dosage form. As used herein, “pharmaceutically acceptable excipient” includes any and all solvents, dispersion media, coatings, antibacterial and antifungal agents, isotonic and absorption delaying agents, and the like that are physiologically compatible. Some examples of pharmaceutically acceptable excipients are water, saline, phosphate buffered saline, dextrose, glycerol, ethanol and the like, as well as combinations thereof. In many cases, it will be preferable to include isotonic agents, for example, sugars, polyalcohols such as mannitol, sorbitol, or sodium chloride in the composition. Additional examples of pharmaceutically acceptable substances are wetting agents or minor amounts of auxiliary substances such as wetting or emulsifying agents, preservatives, or buffers, which enhance the shelf life or effectiveness of the antibody.

[0213] Formulations of a pharmaceutical composition suitable for parenteral administration typically comprise the active ingredient combined with a pharmaceutically acceptable carrier, such as sterile water or sterile isotonic saline. Such formulations may be prepared, packaged, or sold in a form suitable for bolus administration or for continuous administration. In some embodiments, the epigenetic editor or its component(s) are introduced to target cells in the form of nucleic acid molecule(s) encoding the epigenetic editor or its component(s); accordingly, the pharmaceutical compositions herein comprise the nucleic acid molecule(s). Such nucleic acid molecule(s) may be, for example, DNA, RNA or mRNA, and/or modified nucleic acid sequence(s) (e.g., with chemical modifications, a 5′ cap, or one or more 3′ modifications). In some embodiments, the nucleic acid molecule(s) may be delivered as naked DNA or RNA, for instance by means of transfection or electroporation, or can be conjugated to molecules (e.g., N-acetylgalactosamine) promoting uptake by target cells. In some embodiments, the nucleic acid molecule(s) may be in nucleic acid expression vector(s), which may include expression control sequences such as promoters, enhancers, transcription signal sequences, transcription termination sequences, introns, polyadenylation signals, Kozak consensus sequences, internal ribosome entry sites (IRES), etc. Such expression control sequences are well known in the art. A vector may also comprise a sequence encoding a signal peptide (e.g., for nuclear localization, nucleolar localization, or mitochondrial localization), associated with (e.g., inserted into or fused to) a sequence coding for a protein.

[0214] Examples of vectors include, but are not limited to, plasmid vectors; viral vectors based on vaccinia virus, poliovirus, adenovirus, adeno-associated virus, SV40, herpes simplex virus, human immunodeficiency virus, retrovirus (e.g., Murine Leukemia Virus, or spleen necrosis virus, vectors derived from retroviruses such as Rous Sarcoma Virus, Harvey Sarcoma Virus, avian leukosis virus, a lentivirus, human immunodeficiency virus, myeloproliferative sarcoma virus, and mammary tumor virus); and other recombinant vectors. In certain embodiments, the vector is a plasmid or a viral vector. Viral particles may also be used to deliver nucleic acid molecule(s) encoding epigenetic editors or component(s) thereof as described herein. For example, “empty” viral particles can be assembled to contain any suitable cargo. Viral vectors and viral particles may also be engineered to incorporate targeting ligands to alter target tissue specificity.

[0215] In certain embodiments, an epigenetic editor as described herein or component(s) thereof are encoded by nucleic acid sequence(s) present in one or more viral vectors, or a suitable capsid protein of any viral vector. Examples of viral vectors include adeno-associated viral vectors (e.g., derived from AAV3, AAV3b, AAV4, AAV5, AAV6, AAV7, AAV8, AAV9, AAVrh8, AAV10, and/or variants thereof); retroviral vectors (e.g., Maloney murine leukemia virus, MML-V), adenoviral vectors (e.g., AD100), lentiviral vectors (e.g., HIV and FIV-based vectors), and herpesvirus vectors (e.g., HSV-2).

[0216] In some embodiments, delivery involves an adeno-associated virus (AAV) vector. AAV vector delivery may be particularly useful where the DNA-binding domain of an epigenetic editor fusion protein is a zinc finger array. Without wishing to be bound by any theory, the smaller size of zinc finger arrays compared to larger DNA-binding domains such as Cas protein domains may allow such a fusion protein to be conveniently packed in viral vectors such as an AAV vector.

[0217] Any AAV serotype, e.g., human AAV serotype, can be used for an AAV vector as described herein, including, but not limited to, AAV serotype 1 (AAV1), AAV serotype 2 (AAV2), AAV serotype 3 (AAV3), AAV serotype 4 (AAV4), AAV serotype 5 (AAV5), AAV serotype 6 (AAV6), AAV serotype 7 (AAV7), AAV serotype 8 (AAV8), AAV serotype 9 (AAV9), AAV serotype 10 (AAV10), and AAV serotype 11 (AAV11), as well as variants thereof. In some embodiments, an AAV variant has at least 90%, 91%, 92%, 93%, 94%, 95%, 96%, 97%, 98%, or 99% amino acid sequence identity to a wildtype AAV. In certain embodiments, the AAV variant may be engineered such that its capsid proteins have reduced immunogenicity or enhanced transduction ability in humans. In some instances, one or more regions of at least two different AAV serotype viruses are shuffled and reassembled to generate a chimeric variant. For example, a chimeric AAV may comprise inverted terminal repeats (ITRs) that are of a heterologous serotype compared to the serotype of the capsid. The resulting chimeric AAV can have a different antigenic reactivity or recognition compared to its parental serotypes. In some embodiments, a chimeric variant of an AAV includes amino acid sequences from 2, 3, 4, 5, or more different AAV serotypes.

[0218] Non-viral systems are also contemplated for delivery as described herein. Non-viral systems include, but are not limited to, nucleic acid transfection methods including electroporation, sonoporation, calcium phosphate transfection, microinjection, DNA biolistics, lipid-mediated transfection, transfection through heat shock, compacted DNA-mediated transfection, lipofection, cationic agent-mediated transfection, and transfection with liposomes, immunoliposomes, or cationic facial amphiphiles (CFAs). In certain embodiments, one or more mRNAs encoding epigenetic editor fusion proteins as described herein may be co-electroporated with one or more guide polynucleotides (e.g., gRNAs) as described herein. One important category of non-viral nucleic acid vectors is nanoparticles, which can be organic (e.g., lipid) or inorganic (e.g., gold). For instance, organic (e.g. lipid and/or polymer) nanoparticles can be suitable for use as delivery vehicles in certain embodiments of this disclosure.

[0219] In some embodiments, delivery is accomplished using a lipid nanoparticle (LNP). LNP compositions are typically sized on the order of micrometers or smaller and may include a lipid bilayer. In some embodiments, a LNP refers to any particle that has a diameter of less than 1000 nm, 500 nm, 250 nm, 200 nm, 150 nm, 100 nm, 75 nm, 50 nm, or 25 nm. Nanoparticle compositions encompass lipid nanoparticles (LNPs), liposomes (e.g., lipid vesicles), and lipoplexes.

[0220] An LNP as described herein may be made from cationic, anionic, or neutral lipids. In some embodiments, an LNP may comprise neutral lipids, such as the fusogenic phospholipid 1,2-Dioleoyl-sn-glycero-3-phosphoethanolamine (DOPE) or the membrane component cholesterol, as helper lipids to enhance transfection activity and nanoparticle stability. In some embodiments, an LNP may comprise hydrophobic lipids, hydrophilic lipids, or both hydrophobic and hydrophilic lipids. Any lipid or combination of lipids that are known in the art can be used to produce an LNP. The lipids may be combined in any molar ratios to produce the LNP. In some embodiments, the LNP is a liver-targeting (e.g., preferentially or specifically targeting the liver) LNP.

[0221] LNP formulations and methods of LNP delivery that can be used will be apparent to those skilled in the art based on the present disclosure and the state of the art. Non-limiting exemplary compositions and methods can be found in Shah, R., Eldridge, D., Palombo, E., and Harding, I., Lipid Nanoparticles: Production, Characterization and Stability, Springer, 2015, ISBN-13 978-3319107103; Ziegler, S., Lipid Nanoparticles: Advances in Research and Applications, Nova Science Pub., Inc, ISBN-13 978-1536186536; Mitchell, M. J., Billingsley, M. M., Haley, R. M. et al. Engineering precision nanoparticles for drug delivery, Nat Rev Drug Discov 20, 101-124 (2021); Hou, X., Zaks, T., Langer, R. et al. Lipid nanoparticles for mRNA delivery. Nat Rev Mater 6, 1078-1094 (2021); Lipid-Nanoparticle-Based Delivery of CRISPR/Cas9 Genome-Editing Components, Pardis Kazemian, Si-Yue Yu, Sarah B. Thomson, Alexandra Birkenshaw, Blair R. Leavitt, and Colin J. D. Ross. Molecular Pharmaceutics 2022 19 (6), 1669-1686; Cullis P R, Hope M J. Lipid Nanoparticle Systems for Enabling Gene Therapies, Mol Ther. 2017 Jul. 5; 25(7):1467-1475; Hatit, M. Z. C., Lokugamage, M. P Dobrowolski, C. N. et al. Species-dependent in vivo mRNA delivery and cellular responses to nanoparticles, Nat. Nanotechnol. 17, 310-318 (2022); Lam, K., Schreiner, P., Leung, A., Stainton, P., Reid, S., Yaworski, E., Lutwyche, P. and Heyes, J. (2023), Optimizing Lipid Nanoparticles for Delivery in Primates, Adv. Mater; Dilliard, S. A., Siegwart, D. J. Passive, active and endogenous organ-targeted lipid and polymer nanoparticles for delivery of genetic drugs, Nat Rev Mater (2023); Kasiewicz, L. N., et. al., Lipid nanoparticles incorporating a GalNAc ligand enable in vivo liver ANGPTL3 editing in wild-type and somatic LDLR knockout non-human primates, bioRxiv 2021.11.08.467731, doi: https://doi.org/10.1101/2021.11.08.467731; Tombácz, I., et. al., Highly efficient CD4+ T cell targeting and genetic recombination using engineered CD4+ cell-homing mRNA-LNPs, Molecular Therapy, Volume 29, Issue 11, 2021, 3293-3304; Cheng, Q., Wei, T., Farbiak, L. et al. Selective organ targeting (SORT) nanoparticles for tissue-specific mRNA delivery and CRISPR—Cas gene editing, Nat. Nanotechnol. 15, 313-320 (2020); Zhang, Y., et. al., Lipids and Lipid Derivatives for RNA Delivery, Chemical Reviews 2021 121 (20); Lam, K., et. al, Unsaturated, Trialkyl Ionizable Lipids are Versatile Lipid-Nanoparticle Components for Therapeutic and Vaccine Applications, Adv. Mater. 2023, 35; Han, X., Zhang, H., Butowska, K. et al. An ionizable lipid toolbox for RNA delivery, Nat Commun 12, 7233 (2021); U.S. Pat. Nos. 9,364,435; 8,058,069; 8,822,668; 8,492,359; 11,141,378; 9,518,272; 9,404,127; 9,006,417; 7,901,708; 9,005,654; 9,878,042; 9,682,139; 8,642,076; 9,593,077; 9,415,109; 9,701,623; 10,369,226; 9,999,673; 9,301,923; 10,342,761; 10,137,201; International Publication No. WO2016081029A1; each of which are incorporated herein by reference in their entirety. The ordinarily skilled artisan will be able to identify an appropriate LNP and method of delivery based on the present disclosure and the state of the art. The present disclosure is not limited in this respect.

[0222] Other methods of delivery to target cells will be known to those skilled in the art and can be used with the compositions of the present disclosure.

[0223] Any type of cell may be targeted for delivery of an epigenetic editor or component(s) thereof as described herein. For example, the cells may be eukaryotic or prokaryotic. In some embodiments, the cells are mammalian (e.g., human) cells. Human cells may include, for example, hepatocytes, biliary epithelial cells (cholangiocytes), stellate cells, Kupffer cells, and liver sinusoidal endothelial cells.

[0224] In some embodiments, an epigenetic editor described herein, or component(s) thereof, are delivered to a host cell for transient expression, e.g., via a transient expression vector. Transient expression of the epigenetic editor or its component(s) may result in prolonged or permanent epigenetic modification of the target gene. For example, the epigenetic modification may be stable for at least 1, 2, 3, 4, 5, 6, 7, 8, 9, 10. 11, or 12 weeks or more; or 3, 4, 5, 6, 7, 8, 9, 10, 11, or 12 months or more, after introduction of the epigenetic editor into the host cell. The epigenetic modification may be maintained after one or more mitotic and/or meiotic events of the host cell. In particular embodiments, the epigenetic modification is maintained across generations in offspring generated or derived from the host cell.

### VIII. Therapeutic Uses of Epigenetic Editors

[0225] The present disclosure also provides methods for treating or preventing a condition in a subject, comprising administering to the subject an epigenetic editor or pharmaceutical composition as described herein. The epigenetic editor may effectuate an epigenetic modification of a target polynucleotide sequence in a target gene associated with a disease, condition, or disorder in the subject, thereby modulating expression of the target gene to treat or prevent the disease, condition, or disorder. In some embodiments, the epigenetic editor reduces the expression of the target gene to an extent sufficient to achieve a desired effect, e.g., a therapeutically relevant effect such as the prevention or treatment of the disease, condition, or disorder.

[0226] In some embodiments, a subject is administered a system for modulating (e.g., repressing) expression of HBV or of an HBV gene, wherein the system comprises (1) the fusion protein(s) and, where relevant, guide polynucleotide(s) of an epigenetic editor as described herein, or (2) nucleic acid molecules encoding said fusion protein(s) and, where relevant, guide polynucleotide(s).

[0227] “Treat,” “treating” and “treatment” refer to a method of alleviating or abrogating a biological disorder and/or at least one of its attendant symptoms. As used herein, to “alleviate” a disease, disorder or condition means reducing the severity and/or occurrence frequency of the symptoms of the disease, disorder, or condition. Further, references herein to “treatment” include references to curative, palliative and prophylactic treatment. In some embodiments, as compared with an equivalent untreated control, alleviating a symptom may involve reduction of the symptom by at least 3%, 5%, 10%, 20%, 40%, 50%, 60%, 80%, 90%, 95%, 98%, 99%, 99.5%, 99.9%, or 100% as measured by any standard technique.

[0228] In some embodiments, the subject may be a mammal, e.g., a human. In some embodiments, the subject is selected from a non-human primate such as chimpanzee, cynomolgus monkey, or macaque, and other apes and monkey species.

[0229] In some embodiments, the human patient has a condition characterized by an HBV infection. In some embodiments, the patient has Hepatitis B.

[0230] In some embodiments, a patient to be treated with an epigenetic editor of the present disclosure has received prior treatment for the condition to be treated (e.g., HBV and/or HDV, or Hepatitis B). In other embodiments, the patient has not received such prior treatment. In some embodiments, the patient has failed on (or is refractory to) a prior treatment for the condition (e.g., a prior HBV treatment).

[0231] An epigenetic editor of the present disclosure may be administered in a therapeutically effective amount to a patient with a condition described herein. “Therapeutically effective amount,” as used herein, refers to an amount of the therapeutic agent being administered that will relieve to some extent one or more of the symptoms of the disorder being treated, and/or result in clinical endpoint(s) desired by healthcare professionals. An effective amount for therapy may be measured by its ability to stabilize disease progression and/or ameliorate symptoms in a patient, and preferably to reverse disease progression. The ability of an epigenetic editor of the present disclosure to reduce or silence HBV expression may be evaluated by in vitro assays, e.g., as described herein, as well as in suitable animal models that are predictive of the efficacy in humans. Suitable dosage regimens will be selected in order to provide an optimum therapeutic response in each particular situation, for example, administered as a single bolus or as a continuous infusion, and with possible adjustment of the dosage as indicated by the exigencies of each case.

[0232] An epigenetic editor of the present disclosure may be administered without additional therapeutic treatments, i.e., as a stand-alone therapy (monotherapy). Alternatively, treatment with an epigenetic editor of the present disclosure may include at least one additional therapeutic treatment (combination therapy). In some embodiments, the additional therapeutic agent is any known in the art to HBV and/or HDV. In some embodiments, therapeutic agents include, but are not limited to, antivirals such as entecavir, tenofovir, lamivudine, telvivudine, bictegravir, emtricitabine, or defovir, as well as immune modulators such as pegylated interferon and interferon alpha.

[0233] The epigenetic editors or components thereof (or nucleic acid molecules encoding the epigenetic editors or components thereof) of the present disclosure may be administered by any method accepted in the art (e.g., parenterally, intravenously, intradermally, or intramuscularly).

[0234] The epigenetic editors or components thereof (or nucleic acid molecules encoding the epigenetic editors or components thereof) of the present disclosure may be administered to a subject once, twice, three times, or 4, 5, 6, 7, 8, 9, 10, or more times. In some embodiments, the one, two, three, or 4, 5, 6, 7, 8, 9, 10, or more administrations of epigenetic editors or components thereof (or nucleic acid molecules encoding the epigenetic editors or components thereof) are in temporal proximity (e.g., within 1 day, 2 days, 3 days, 4 days, 5 days, 6 days, 1 week, 2 weeks, 4 weeks, 1 month or two months of each other). In some embodiments, a subject is re-dosed with the epigenetic editors or components thereof (or nucleic acid molecules encoding the epigenetic editors or components thereof) of the present disclosure for at least one more time after an initial dose. In some cases, a subject is administered with a subsequent dose of the epigenetic editors or components thereof (or nucleic acid molecules encoding the epigenetic editors or components thereof) of the present disclosure, which target a different DNA region of the HBV genome than the DNA region of the HBV genome that is targeted by the epigenetic editors or components thereof that the subject receives at the initial dose. In some cases, a subject is administered with multiple doses (e.g., 2, 3, 4, 5, 6, 7, 8, 9, 10, or more) of the same epigenetic editors or components thereof (or nucleic acid molecules encoding the epigenetic editors or components thereof) of the present disclosure. In some cases, a subject is administered with a single dose of different epigenetic editors or components thereof (or nucleic acid molecules encoding the epigenetic editors or components thereof) of the present disclosure, at least two of which target different DNA regions of the HBV genome. In some cases, a subject is administered with multiple doses (e.g., 2, 3, 4, 5, 6, 7, 8, 9, 10, or more) of different epigenetic editors or components thereof (or nucleic acid molecules encoding the epigenetic editors or components thereof) of the present disclosure, at least two of which target different DNA regions of the HBV genome. In some embodiments, redosing of the epigenetic editors or components thereof (or nucleic acid molecules encoding the epigenetic editors or components thereof) of the present disclosure has a better therapeutic efficacy than a single dose of the same, e.g., more potent suppression of HBV replication, or more profound reduction in HBV DNA and/or HBV antigens (e.g., HBsAg, HBeAg, and/or HBV core antigen (HBcAg)) present in the subject, e.g., in the circulation system and/or liver of the subject.

### XII. Definitions

[0235] The term “nucleic acid” as used herein refers to any oligonucleotide or polynucleotide containing nucleotides (e.g., deoxyribonucleotides or ribonucleotides) in either single- or double-strand form, and includes DNA and RNA. “Nucleotides” contain a sugar deoxyribose (DNA) or ribose (RNA), a base, and a phosphate group, and are linked together through the phosphate groups. “Bases” include purines and pyrimidines, which include natural compounds such as adenine, thymine, guanine, cytosine, uracil, inosine, and natural analogs; as well as synthetic derivatives of purines and pyrimidines, which include, but are not limited to, modified versions which place new reactive groups such as amines, alcohols, thiols, carboxylates, alkylhalides, etc. Nucleic acids may contain known nucleotide analogs and/or modified backbone residues or linkages, which may be synthetic, naturally occurring, and non-naturally occurring. Such nucleotide analogs, modified residues, and modified linkages are well known in the art, and may provide a nucleic acid molecule with enhanced cellular uptake, reduced immunogenicity, and/or increased stability in the presence of nucleases.

[0236] As used herein, an “isolated” or “purified” nucleic acid molecule is a nucleic acid molecule that exists apart from its native environment. For example, an “isolated” or “purified” nucleic acid molecule (1) has been separated away from the nucleic acids of the genomic DNA or cellular RNA of its source of origin; and/or (2) does not occur in nature. In some embodiments, an “isolated” or “purified” nucleic acid molecule is a recombinant nucleic acid molecule.

[0237] It will be understood that in addition to the specific proteins and nucleic acid molecules mentioned herein, the present disclosure also contemplates the use of variants, derivatives, homologs, and fragments thereof. A variant of any given sequence may have the specific sequence of residues (whether amino acid or nucleic acid residues) modified in such a manner that the polypeptide or polynucleotide in question substantially retains at least one of its endogenous functions. A variant sequence can be obtained by addition, deletion, substitution, modification, replacement and/or variation of at least one residue present in the naturally-occurring sequence (in some embodiments, no more than 1, 2, 3, 4, 5, 6, 7, 8, 9, 10, 15, or 20 residues). For specific proteins described herein (e.g., KRAB, dCas9, DNMT3A, and DNMT3L proteins described herein), the present disclosure also contemplates any of the protein's naturally occurring forms, or variants or homologs that retain at least one of its endogenous functions (e.g., at least 50%, 60%, 70%, 80%, 90%, 85%, 96%, 97%, 98%, or 99% of its function as compared to the specific protein described).

[0238] As used herein, a homologue of any polypeptide or nucleic acid sequence contemplated herein includes sequences having a certain homology with the wildtype amino acid and nucleic sequence. A homologous sequence may include a sequence, e.g. an amino acid sequence which may be at least 50%, 55%, 65%, 75%, 85%, 90%, 91%, 92%<93%, 94%, 95%, 96%, 97%, 98%, or 99% identical to the subject sequence. The term “percent identical” in the context of amino acid or nucleotide sequences refers to the percent of residues in two sequences that are the same when aligned for maximum correspondence. In some embodiments, the length of a reference sequence aligned for comparison purposes is at least 30%, (e.g., at least 40, 50, 60, 70, 80, or 90%, or 100%) of the reference sequence. Sequence identity may be measured using sequence analysis software (for example, Sequence Analysis Software Package of the Genetics Computer Group, University of Wisconsin Biotechnology Center, 1710 University Avenue, Madison, Wis. 53705, BLAST, BESTFIT, GAP, or PILEUP/PRETTYBOX programs). Such software matches identical or similar sequences by assigning degrees of homology to various substitutions, deletions, and/or other modifications. In an exemplary approach to determining the degree of identity, a BLAST program may be used, with a probability score between e-3 and e-100 indicating a closely related sequence.

[0239] The percent identity of two nucleotide or polypeptide sequences is determined by, e.g., BLAST® using default parameters (available at the U.S. National Library of Medicine's National Center for Biotechnology Information website). In some embodiments, the length of a reference sequence aligned for comparison purposes is at least 30%, (e.g., at least 40, 50, 60, 70, 80, or 90%) of the reference sequence.

[0240] It will be understood that the numbering of the specific positions or residues in polypeptide sequences depends on the particular protein and numbering scheme used. Numbering might be different, e.g., in precursors of a mature protein and the mature protein itself, and differences in sequences from species to species may affect numbering. One of skill in the art will be able to identify the respective residue in any homologous protein and in the respective encoding nucleic acid by methods well known in the art, e.g., by sequence alignment and determination of homologous residues.

[0241] The term “modulate” or “alter” refers to a change in the quantity, degree, or extent of a function. For example, an epigenetic editor as described herein may modulate the activity of a promoter sequence by binding to a motif within the promoter, thereby inducing, enhancing, or suppressing transcription of a gene operatively linked to the promoter sequence. As other examples, an epigenetic editor as described herein may block RNA polymerase from transcribing a gene, or may inhibit translation of an mRNA transcript. The terms “inhibit,” “repress,” “suppress,” “silence” and the like, when used in reference to an epigenetic editor or a component thereof as described herein, refers to decreasing or preventing the activity (e.g., transcription) of a nucleic acid sequence (e.g., a target gene) or protein relative to the activity of the nucleic acid sequence or protein in the absence of the epigenetic editor or component thereof. The term may include partially or totally blocking activity, or preventing or delaying activity. The inhibited activity may be, e.g., 10%, 20%, 30%, 40%, 50%, 60%, 70%, 75%, 80%, 85%, 90%, 91%, 92%, 93%, 94%, 95%, 96%, 97%, 98%, or 99% less than that of a control, or may be, e.g., at least 1.5-fold, 2-fold, 3-fold, 4-fold, 5-fold, or 10-fold less than that of a control.

[0242] The term “about” or “approximately” means within an acceptable error range for the particular value as determined by one of ordinary skill in the art, which will depend in part on how the value is measured or determined, e.g., the limitations of the measurement system. For example, “about” can mean within one or more than one standard deviation, per the practice in the given value. Where particular values are described in the application and claims, unless otherwise stated, the term “about” should be assumed to mean an acceptable error range for the particular value.

[0243] Ranges provided herein are understood to be shorthand for all of the values within the range. For example, a range of 1 to 50 is understood to include any number, combination of numbers, or sub-range from the group consisting of 1, 2, 3, 4, 5, 6, 7, 8, 9, 10, 11, 12, 13, 14, 15, 16, 17, 18, 19, 20, 21, 22, 23, 24, 25, 26, 27, 28, 29, 30, 31, 32, 33, 34, 35, 36, 37, 38, 39, 40, 41, 42, 43, 44, 45, 46, 47, 48, 49, or 50, as well as all intervening decimal values between the aforementioned integers such as, for example, 1.1, 1.2, 1.3, 1.4, 1.5, 1.6, 1.7, 1.8, and 1.9. With respect to sub-ranges, “nested sub-ranges” that extend from either end point of the range are specifically contemplated. For example, a nested sub-range of an exemplary range of 1 to 50 may comprise 1 to 10, 1 to 20, 1 to 30, and 1 to 40 in one direction, or 50 to 40, 50 to 30, 50 to 20, and 50 to 10 in the other direction.

[0244] Unless otherwise defined herein, scientific and technical terms used in connection with the present disclosure shall have the meanings that are commonly understood by those of ordinary skill in the art. Exemplary methods and materials are described below, although methods and materials similar or equivalent to those described herein can also be used in the practice or testing of the present disclosure. In case of conflict, the present specification, including definitions, will control. Further, unless otherwise required by context, singular terms shall include pluralities and plural terms shall include the singular. Throughout this specification and embodiments, the words “have” and “comprise,” or variations such as “has,” “having,” “comprises,” or “comprising,” will be understood to imply the inclusion of a stated integer or group of integers but not the exclusion of any other integer or group of integers. The recitation of a listing of elements herein includes any of the elements singly or in any combination. The recitation of an embodiment herein includes that embodiment as a single embodiment, or in combination with any other embodiment(s) herein. All publications, patents, patent applications, and other references mentioned herein are incorporated by reference in their entirety. To the extent that references incorporated by reference contradict the disclosure contained in the specification, the specification is intended to supersede and/or take precedence over any such contradictory material. Although a number of documents are cited herein, this citation does not constitute an admission that any of these documents forms part of the common general knowledge in the art.

[0245] In order that the present disclosure may be better understood, the following examples are set forth. These examples are for purposes of illustration only and are not to be construed as limiting the scope of the present disclosure in any manner.

### EXAMPLES

### Example 1: Selection of Target HBV Sequences for Epigenetic Silencing

[0246] Target sequences were manually and computationally designed using the representative HBV genome sequences (SEQ ID Nos. 1082, 1083) as a reference:

[0247] While target site design focused on CpG islands identified within the HBV genome, target sites outside of HBV CpG islands were also considered.

[0248] Table 2 presents some representative target sites that were identified as suitable for targeting with an epigenetic repressor.

[0249] Target domains identified above that are adjacent to a PAM sequence, e.g., an S. pyogenes Cas9 PAM sequence, can be targeted by a CRISPR-based epigenetic repressor, e.g., an epigenetic repressor comprising a dCas9 DNA-binding domain. For example, target sites 1-143 are suitable for dCas9-based epigenetic repressor targeting. FIG. 1 provides an overview over the position of the target sites identified in the HBV genome.

[0250] Target sites were analyzed for conservation across HBV genotypes A-E (FIGS. 2 and 3). Some target sites were identified that were well conserved across two or more, or in some cases all, HBV genotypes. Targeting such conserved sites allows for silencing different genotypes with the same epigenetic repressor.

### Example 2: Guide RNA Assays in HepAD38 HBV Cells

[0251] The HepAD38 cell line expresses the HBV genome under a doxycycline-inducible promoter (see, e.g., Ladner et al., Inducible expression of human hepatitis B virus (HBV) in stably transfected hepatoblastoma cells: a novel system for screening potential inhibitors of HBV replication. Antimicrob. Agents Chemother. 41:1715-1720(1997), incorporated herein by reference).

[0252] Results are shown in FIGS. 4A and B.

### Example 3: Guide RNA Assays in HepG2-NTCP cells

[0253] HepG2 cells were engineered by lentiviral transduction to express the human NTCP receptor which is used by hepatitis B virus (HBV) to infect the cells.

[0254] HBV viral particles were produced using the HepAD38 cell line. HepAD38 is a subclone, derived from HepG2 cell line, that expresses HBV genome (genotype D subtype ayw) under the transcriptional control of a tetracycline-responsive promoter in a TET-OFF system.

[0255] A triple combination of Engineered Transcriptional Repressors (ETRs) consisting of three plasmids expressing dCas9-KRAB, dCas9-DNMT3A and dCas9-DNMT3L was used in combination with one or more of the designed sgRNAs.

[0256] LNPs were formulated using GENVOY ILM Lipid Mix (Precision Nanosystem) and the formulator Nanoassemblr Spark (Precision Nanosystem). LNPs were formulated according to the manufacturer's recommendations with Nitrogen:Phosphate (NP) ratio equal to 6 and flow rate ratio (FRR) 2:1. The RNA payload was diluted to a final concentration of 350 ng/uL in the PNI formulation buffer. The ETRs, dCas9-KRAB, dCas9-DNMT3A, dCas9-DNMT3L and each of the 121 sgRNA were mixed at 1:1:1:4 ratio. The RNA mix, the Genvoy lipid mix (25 mM) and PBS were loaded each in the dedicated chambers of the Spark cartridge and formulated. The quality of the formulated LNPs was evaluated quantifying the packaged mRNA using Quant-it™ RiboGreen RNA Assay Kit (Thermo Fisher) and sizing the LNP by Dynamic Light Scattering (Zetasizer, Malvem Panalytic).

[0257] HepG2-NTCP cells were plated at 20,000 cells/well in collagen coated 96 well plates. After 24 h cells were infected with HBV at 5,000 multiplicity of genome equivalent (MGE) and 16 h after viral inoculum was removed, cells were washed with PBS, and fresh media was added. Three days post-infection, using LNPs, each sgRNA and the mRNAs encoding each of the components of the triple constructs of ETRs (dCas9-KRAB, dCas9-DNMT3A, dCas9-DNMT3L) were delivered. Three days after, LNP was removed, medium was replaced, and cells were maintained in complete medium for three days.

[0258] Viral antigens HBeAg and HBsAg were quantified 6 days after LNP removal using ELISA assays. Data were normalized to a non-targeting guide designed against the mouse PCSK9 and control 3.2 gRNA was used as positive control. Cells viability assay were performed and normalized to non-targeting control.

[0259] The Table below provides amino acid sequences of exemplary epigenetic editors used in the gRNA screen (the ETR constructs):

TABLE 6
amino acid sequences of exemplary epigenetic editors

| SEQ | | |
|---|---|---|
| ID NO | Description | Amino acid sequence |
| 476 | dCas9:G:KRAB | MYPYDVPDYASPKKKRKVEASDKKYSIGLAIGTNSVGWAVITDEYKVPSKKFK |
| | | VLGNTDRHSIKKNLIGALLFDSGETAEATRLKRTARRRYTRRKNRICYLQEIF |
| | | SNEMAKVDDSFFHRLEESFLVEEDKKHERHPIFGNIVDEVAYHEKYPTIYHLR |
| | | KKLVDSTDKADLRLIYLALAHMIKFRGHFLIEGDLNPDNSDVDKLFIQLVQTY |
| | | NQLFEENPINASGVDAKAILSARLSKSRRLENLIAQLPGEKKNGLFGNLIALS |
| | | LGLTPNFKSNFDLAEDAKLQLSKDTYDDDLDNLLAQIGDQYADLFLAAKNLSD |
| | | AILLSDILRVNTEITKAPLSASMIKRYDEHHQDLTLLKALVRQQLPEKYKEIF |
| | | FDQSKNGYAGYIDGGASQEEFYKFIKPILEKMDGTEELLVKLNREDLLRKQRT |
| | | FDNGSIPHQIHLGELHAILRRQEDFYPFLKDNREKIEKILTFRIPYYVGPLAR |
| | | GNSRFAWMTRKSEETITPWNFEEVVDKGASAQSFIERMTNEDKNLPNEKVLPK |
| | | HSLLYEYFTVYNELTKVKYVTEGMRKPAFLSGEQKKAIVDLLFKTNRKVTVKQ |
| | | LKEDYFKKIECFDSVEISGVEDRENASLGTYHDLLKIIKDKDFLDNEENEDIL |
| | | EDIVLTLTLFEDREMIEERLKTYAHLEDDKVMKQLKRRRYTGWGRLSRKLING |
| | | IRDKQSGKTILDFLKSDGFANRNFMQLIHDDSLTFKEDIQKAQVSGQGDSLHE |
| | | HIANLAGSPAIKKGILQTVKVVDELVKVMGRHKPENIVIEMARENQTTQKGQK |
| | | NSRERMKRIEEGIKELGSQILKEHPVENTQLQNEKLYLYYLQNGRDMYVDQEL |
| | | DINRLSDYDVDAIVPQSFLKDDSIDNKVLTRSDKNRGKSDNVPSEEVVKKMKN |
| | | YWRQLLNAKLITQRKFDNLTKAERGGLSELDKAGFIKRQLVETRQITKHVAQI |
| | | LDSRMNTKYDENDKLIREVKVITLKSKLVSDERKDFQFYKVREINNYHHAHDA |
| | | YLNAVVGTALIKKYPKLESEFVYGDYKVYDVRKMIAKSEQEIGKATAKYFFYS |
| | | NIMNFFKTEITLANGEIRKRPLIETNGETGEIVWDKGRDFATVRKVLSMPQVN |
| | | IVKKTEVQTGGFSKESILPKRNSDKLIARKKDWDPKKYGGFDSPTVAYSVLVV |
| | | AKVEKGKSKKLKSVKELLGITIMERSSFEKNPIDFLEAKGYKEVKKDLIIKLP |
| | | KYSLFELENGRKRMLASAGELQKGNELALPSKYVNFLYLASHYEKLKGSPEDN |
| | | EQKQLFVEQHKHYLDEIIEQISEFSKRVILADANLDKVLSAYNKHRDKPIREQ |
| | | AENIIHLFTLTNLGAPAAFKYEDTTIDRKRYTSTKEVLDATLIHQSITGLYET |
| | | RIDLSQLGGDSPKKKRKVGVDGSGGGALSPQHSAVTQGSIIKNKEGMDAKSLT |
| | | AWSRTLVTFKDVFVDFTREEWKLLDTAQQIVYRNVMLENYKNLVSLGYQLTKP |
| | | DVILRLEKGEEPWLVEREIHQETHPDSETAFEIKSSV* |
| | | YPYDVPDYA (SEQ ID NO: 479)-HA-Tag |
| | | GSGGG (SEQ ID NO: 480)-Linker |
| 477 | dCas9:G:DNMT3A | MYPYDVPDYASPKKKRKVEASDKKYSIGLAIGTNSVGWAVITDEYKVPSKKFK |
| | | VLGNTDRHSIKKNLIGALLFDSGETAEATRLKRTARRRYTRRKNRICYLQEIF |
| | | SNEMAKVDDSFFHRLEESFLVEEDKKHERHPIFGNIVDEVAYHEKYPTIYHLR |
| | | KKLVDSTDKADLRLIYLALAHMIKFRGHFLIEGDLNPDNSDVDKLFIQLVQTY |
| | | NQLFEENPINASGVDAKAILSARLSKSRRLENLIAQLPGEKKNGLFGNLIALS |
| | | LGLTPNFKSNFDLAEDAKLQLSKDTYDDDLDNLLAQIGDQYADLFLAAKNLSD |
| | | AILLSDILRVNTEITKAPLSASMIKRYDEHHQDLTLLKALVRQQLPEKYKEIF |
| | | FDQSKNGYAGYIDGGASQEEFYKFIKPILEKMDGTEELLVKLNREDLLRKQRT |
| | | FDNGSIPHQIHLGELHAILRRQEDFYPFLKDNREKIEKILTFRIPYYVGPLAR |
| | | GNSRFAWMTRKSEETITPWNFEEVVDKGASAQSFIERMTNEDKNLPNEKVLPK |
| | | HSLLYEYFTVYNELTKVKYVTEGMRKPAFLSGEQKKAIVDLLFKTNRKVTVKQ |
| | | LKEDYFKKIECFDSVEISGVEDRENASLGTYHDLLKIIKDKDFLDNEENEDIL |
| | | EDIVLTLTLFEDREMIEERLKTYAHLEDDKVMKQLKRRRYTGWGRLSRKLING |
| | | IRDKQSGKTILDFLKSDGFANRNFMQLIHDDSLTFKEDIQKAQVSGQGDSLHE |
| | | HIANLAGSPAIKKGILQTVKVVDELVKVMGRHKPENIVIEMARENQTTQKGQK |
| | | NSRERMKRIEEGIKELGSQILKEHPVENTQLQNEKLYLYYLQNGRDMYVDQEL |
| | | DINRLSDYDVDAIVPQSFLKDDSIDNKVLTRSDKNRGKSDNVPSEEVVKKMKN |
| | | YWRQLLNAKLITQRKFDNLTKAERGGLSELDKAGFIKRQLVETRQITKHVAQI |
| | | LDSRMNTKYDENDKLIREVKVITLKSKLVSDERKDFQFYKVREINNYHHAHDA |
| | | YLNAVVGTALIKKYPKLESEFVYGDYKVYDVRKMIAKSEQEIGKATAKYFFYS |
| | | NIMNFFKTEITLANGEIRKRPLIETNGETGEIVWDKGRDFATVRKVLSMPQVN |
| | | IVKKTEVQTGGFSKESILPKRNSDKLIARKKDWDPKKYGGFDSPTVAYSVLVV |
| | | AKVEKGKSKKLKSVKELLGITIMERSSFEKNPIDFLEAKGYKEVKKDLIIKLP |
| | | KYSLFELENGRKRMLASAGELQKGNELALPSKYVNFLYLASHYEKLKGSPEDN |
| | | EQKQLFVEQHKHYLDEIIEQISEFSKRVILADANLDKVLSAYNKHRDKPIREQ |
| | | AENIIHLFTLTNLGAPAAFKYFDTTIDRKRYTSTKEVLDATLIHQSITGLYET |
| | | RIDLSQLGGDSPKKKRKVGVDGSGGGTYGLLRRREDWPSRLQMFFANNHDQEF |
| | | DPPKVYPPVPAEKRKPIRVLSLEDGIATGLLVLKDLGIQVDRYIASEVCEDSI |
| | | TVGMVRHQGKIMYVGDVRSVTQKHIQEWGPEDLVIGGSPCNDLSIVNPARKGL |
| | | YEGTGRLFFEFYRLLHDARPKEGDDRPFFWLFENVVAMGVSDKRDISRFLESN |
| | | PVMIDAKEVSAAHRARYFWGNLPGMNRPLASTVNDKLELQECLEHGRIAKESK |
| | | VRTITTRSNSIKQGKDQHFPVFMNEKEDILWCTEMERVFGFPVHYTDVSNMSR |
| | | LARQRLLGRSWSVPVIRHLFAPLKEYFACV* |
| | | YPYDVPDYA (SEQ ID NO: 479)-HA-Tag |
| | | GSGGG (SEQ ID NO: 480)-Linker |
| 478 | dCas9:G:hDNMT3L | MYPYDVPDYASPKKKRKVEASDKKYSIGLAIGTNSVGWAVITDEYKVPSKKFK |
| | | VLGNTDRHSIKKNLIGALLFDSGETAEATRLKRTARRRYTRRKNRICYLQEIF |
| | | SNEMAKVDDSFFHRLEESFLVEEDKKHERHPIFGNIVDEVAYHEKYPTIYHLR |
| | | KKLVDSTDKADLRLIYLALAHMIKERGHFLIEGDLNPDNSDVDKLFIQLVQTY |
| | | NQLFEENPINASGVDAKAILSARLSKSRRLENLIAQLPGEKKNGLFGNLIALS |
| | | LGLTPNFKSNFDLAEDAKLQLSKDTYDDDLDNLLAQIGDQYADLFLAAKNLSD |
| | | AILLSDILRVNTEITKAPLSASMIKRYDEHHQDLTLLKALVRQQLPEKYKEIF |
| | | FDQSKNGYAGYIDGGASQEEFYKFIKPILEKMDGTEELLVKLNREDLLRKQRT |
| | | FDNGSIPHQIHLGELHAILRRQEDFYPFLKDNREKIEKILTFRIPYYVGPLAR |
| | | GNSRFAWMTRKSEETITPWNFEEVVDKGASAQSFIERMTNEDKNLPNEKVLPK |
| | | HSLLYEYFTVYNELTKVKYVTEGMRKPAFLSGEQKKAIVDLLFKTNRKVTVKQ |
| | | LKEDYFKKIECFDSVEISGVEDRENASLGTYHDLLKIIKDKDFLDNEENEDIL |
| | | EDIVLTLTLFEDREMIEERLKTYAHLEDDKVMKQLKRRRYTGWGRLSRKLING |
| | | IRDKQSGKTILDELKSDGFANRNEMQLIHDDSLTFKEDIQKAQVSGQGDSLHE |
| | | HIANLAGSPAIKKGILQTVKVVDELVKVMGRHKPENIVIEMARENQTTQKGQK |
| | | NSRERMKRIEEGIKELGSQILKEHPVENTQLQNEKLYLYYLQNGRDMYVDQEL |
| | | DINRLSDYDVDAIVPQSFLKDDSIDNKVLTRSDKNRGKSDNVPSEEVVKKMKN |
| | | YWRQLLNAKLITQRKEDNLTKAERGGLSELDKAGFIKRQLVETRQITKHVAQI |
| | | LDSRMNTKYDENDKLIREVKVITLKSKLVSDFRKDFQFYKVREINNYHHAHDA |
| | | YLNAVVGTALIKKYPKLESEFVYGDYKVYDVRKMIAKSEQEIGKATAKYFFYS |
| | | NIMNFFKTEITLANGEIRKRPLIETNGETGEIVWDKGRDFATVRKVLSMPQVN |
| | | IVKKTEVQTGGFSKESILPKRNSDKLIARKKDWDPKKYGGFDSPTVAYSVLVV |
| | | AKVEKGKSKKLKSVKELLGITIMERSSFEKNPIDFLEAKGYKEVKKDLIIKLP |
| | | KYSLFELENGRKRMLASAGELQKGNELALPSKYVNFLYLASHYEKLKGSPEDN |
| | | EQKQLFVEQHKHYLDEIIEQISEFSKRVILADANLDKVLSAYNKHRDKPIREQ |
| | | AENIIHLFTLTNLGAPAAFKYEDTTIDRKRYTSTKEVLDATLIHQSITGLYET |
| | | RIDLSQLGGDSPKKKRKVGVDGSGGGMAAIPALDPEAEPSMDVILVGSSELSS |
| | | SVSPGTGRDLIAYEVKANQRNIEDICICCGSLQVHTQHPLFEGGICAPCKDKF |
| | | LDALFLYDDDGYQSYCSICCSGETLLICGNPDCTRCYCFECVDSLVGPGTSGK |
| | | VHAMSNWVCYLCLPSSRSGLLQRRRKWRSQLKAFYDRESENPLEMFETVPVWR |
| | | RQPVRVLSLFEDIKKELTSLGFLESGSDPGQLKHVVDVTDTVRKDVEEWGPED |
| | | LVYGATPPLGHTCDRPPSWYLFQFHRLLQYARPKPGSPRPFFWMFVDNLVLNK |
| | | EDLDVASRFLEMEPVTIPDVHGGSLQNAVRVWSNIPAIRSRHWALVSEEELSL |
| | | LAQNKQSSKLAAKWPTKLVKNCFLPLREYFKYFSTELTSSL* |
| | | YPYDVPDYA (SEQ ID NO: 479)-HA-Tag |
| | | GSGGG (SEQ ID NO: 480)-Linker |
| 479 | HA-Tag | YPYDVPDYA |
| 480 | linker | GSGGG |

[0260] The Table below provides amino acid sequences and polynucleotide sequences of exemplary epigenetic editors

TABLE 7
sequences of exemplary epigenetic editors

| SEQ | | |
|---|---|---|
| ID NO | Description | Sequence |
| 481 | PLA001 amino | MPKKKRKVPKKKRKVYNHDQEFDPPKVYPPVPAEKRKPIRVLSLFDGIATG |
| | acid sequence | LLVLKDLGIQVDRYIASEVCEDSITVGMVRHQGKIMYVGDVRSVTQKHIQE |
| | | WGPFDLVIGGSPCNDLSIVNPARKGLYEGTGRLFFEFYRLLHDARPKEGDD |
| | | RPFFWLFENVVAMGVSDKRDISRFLESNPVMIDAKEVSAAHRARYFWGNLP |
| | | GMNRPLASTVNDKLELQECLEHGRIAKFSKVRTITTRSNSIKQGKDQHFPV |
| | | FMNEKEDILWCTEMERVFGFPVHYTDVSNMSRLARQRLLGRSWSVPVIRHL |
| | | FAPLKEYFACVSSGNSNANSRGPSFSSGLVPLSLRGSHMAAIPALDPEAEP |
| | | SMDVILVGSSELSSSVSPGTGRDLIAYEVKANQRNIEDICICCGSLQVHTQ |
| | | HPLFEGGICAPCKDKFLDALFLYDDDGYQSYCSICCSGETLLICGNPDCTR |
| | | CYCFECVDSLVGPGTSGKVHAMSNWVCYLCLPSSRSGLLQRRRKWRSQLKA |
| | | FYDRESENPLEMFETVPVWRRQPVRVLSLFEDIKKELTSLGFLESGSDPGQ |
| | | LKHVVDVTDTVRKDVEEWGPFDLVYGATPPLGHTCDRPPSWYLFQFHRLLQ |
| | | YARPKPGSPRPFFWMFVDNLVLNKEDLDVASRFLEMEPVTIPDVHGGSLQN |
| | | AVRVWSNIPAIRSRHWALVSEEELSLLAQNKQSSKLAAKWPTKLVKNCFLP |
| | | LREYFKYFSTELTSSLGGPSSGAPPPSGGSPAGSPTSTEEGTSESATPESG |
| | | PGTSTEPSEGSAPGSPAGSPTSTEEGTSTEPSEGSAPGTSTEPSELEDKKY |
| | | SIGLAIGTNSVGWAVITDEYKVPSKKFKVLGNTDRHSIKKNLIGALLFDSG |
| | | ETAEATRLKRTARRRYTRRKNRICYLQEIFSNEMAKVDDSFFHRLEESFLV |
| | | EEDKKHERHPIFGNIVDEVAYHEKYPTIYHLRKKLVDSTDKADLRLIYLAL |
| | | AHMIKFRGHFLIEGDLNPDNSDVDKLFIQLVQTYNQLFEENPINASGVDAK |
| | | AILSARLSKSRRLENLIAQLPGEKKNGLFGNLIALSLGLTPNFKSNFDLAE |
| | | DAKLQLSKDTYDDDLDNLLAQIGDQYADLFLAAKNLSDAILLSDILRVNTE |
| | | ITKAPLSASMIKRYDEHHQDLTLLKALVRQQLPEKYKEIFFDQSKNGYAGY |
| | | IDGGASQEEFYKFIKPILEKMDGTEELLVKLNREDLLRKQRTFDNGSIPHQ |
| | | IHLGELHAILRRQEDFYPFLKDNREKIEKILTFRIPYYVGPLARGNSRFAW |
| | | MTRKSEETITPWNFEEVVDKGASAQSFIERMTNFDKNLPNEKVLPKHSLLY |
| | | EYFTVYNELTKVKYVTEGMRKPAFLSGEQKKAIVDLLFKTNRKVTVKQLKE |
| | | DYFKKIECFDSVEISGVEDRFNASLGTYHDLLKIIKDKDFLDNEENEDILE |
| | | DIVLTLTLFEDREMIEERLKTYAHLFDDKVMKQLKRRRYTGWGRLSRKLIN |
| | | GIRDKQSGKTILDFLKSDGFANRNFMQLIHDDSLTFKEDIQKAQVSGQGDS |
| | | LHEHIANLAGSPAIKKGILQTVKVVDELVKVMGRHKPENIVIEMARENQTT |
| | | QKGQKNSRERMKRIEEGIKELGSQILKEHPVENTQLQNEKLYLYYLQNGRD |
| | | MYVDQELDINRLSDYDVDAIVPQSFLKDDSIDNKVLTRSDKNRGKSDNVPS |
| | | EEVVKKMKNYWRQLLNAKLITQRKFDNLTKAERGGLSELDKAGFIKRQLVE |
| | | TRQITKHVAQILDSRMNTKYDENDKLIREVKVITLKSKLVSDFRKDFQFYK |
| | | VREINNYHHAHDAYLNAVVGTALIKKYPKLESEFVYGDYKVYDVRKMIAKS |
| | | EQEIGKATAKYFFYSNIMNFFKTEITLANGEIRKRPLIETNGETGEIVWDK |
| | | GRDFATVRKVLSMPQVNIVKKTEVQTGGFSKESILPKRNSDKLIARKKDWD |
| | | PKKYGGFDSPTVAYSVLVVAKVEKGKSKKLKSVKELLGITIMERSSFEKNP |
| | | IDFLEAKGYKEVKKDLIIKLPKYSLFELENGRKRMLASAGELQKGNELALP |
| | | SKYVNFLYLASHYEKLKGSPEDNEQKQLFVEQHKHYLDEIIEQISEFSKRV |
| | | ILADANLDKVLSAYNKHRDKPIREQAENIIHLFTLTNLGAPAAFKYFDTTI |
| | | DRKRYTSTKEVLDATLIHQSITGLYETRIDLSQLGGDSPKKKRKVGVDGSS |
| | | GSETPGTSESATPESTGDSVAFEDVAVNFTLEEWALLDPSQKNLYRDVMRE |
| | | TFRNLASVGKQWEDQNIEDPFKIPRRNISHIPERLCESKEGGQGEESADYK |
| | | DDDDKAPKKKRKVPKKKRKV |
| 482 | PLA001 | ATGCCAAAAAAGAAGAGAAAGGTACCGAAGAAAAAAAGAAAGGTATACAAT |
| | polynucleotide | CACGATCAGGAGTTCGACCCCCCTAAGGTGTACCCACCAGTGCCTGCAGAG |
| | sequence | AAGAGGAAGCCAATCCGGGTGCTGAGCCTGTTTGATGGCATCGCCACCGGC |
| | | CTGCTGGTGCTGAAGGATCTGGGCATCCAGGTGGACCGGTACATCGCCTCC |
| | | GAGGTGTGCGAGGATTCTATCACCGTGGGCATGGTGCGCCACCAGGGCAAG |
| | | ATCATGTATGTGGGCGACGTGCGGTCCGTGACACAGAAGCACATCCAGGAG |
| | | TGGGGCCCATTCGATCTGGTGATCGGCGGCAGCCCCTGTAATGACCTGTCC |
| | | ATCGTGAACCCTGCAAGGAAGGGACTGTACGAGGGAACCGGCCGGCTGTTC |
| | | TTTGAGTTTTATAGACTGCTGCACGACGCCAGGCCTAAGGAGGGCGACGAT |
| | | AGACCATTCTTTTGGCTGTTCGAGAATGTGGTGGCTATGGGCGTGAGCGAT |
| | | AAGAGGGACATCTCCAGGTTTCTGGAGTCTAACCCCGTGATGATCGATGCA |
| | | AAGGAGGTGTCCGCCGCACACAGAGCCAGGTATTTCTGGGGCAATCTGCCA |
| | | GGAATGAACAGGCCACTGGCAAGCACCGTGAATGACAAGCTGGAGCTGCAG |
| | | GAGTGCCTGGAGCACGGAAGGATCGCCAAGTTTTCCAAGGTGCGCACAATC |
| | | ACCACACGGAGCAATTCCATCAAGCAGGGCAAGGATCAGCACTTCCCCGTG |
| | | TTCATGAACGAGAAGGAGGACATCCTGTGGTGTACCGAGATGGAGAGAGTG |
| | | TTCGGCTTTCCAGTGCACTACACAGACGTGTCTAACATGAGCAGGCTGGCA |
| | | AGGCAGCGGCTGCTGGGCAGATCTTGGAGCGTGCCCGTGATCAGGCACCTG |
| | | TTCGCCCCTCTGAAGGAGTATTTTGCCTGCGTGAGCAGCGGCAACTCCAAT |
| | | GCCAACAGCCGGGGCCCCTCTTTCAGCTCCGGATTGGTGCCTCTGAGCCTG |
| | | AGGGGCTCCCACATGGCAGCAATCCCCGCCCTGGACCCCGAGGCCGAGCCT |
| | | AGCATGGACGTGATCCTGGTGGGCTCTAGCGAGCTGTCCTCTAGCGTGTCT |
| | | CCAGGAACCGGAAGGGATCTGATCGCATACGAGGTGAAGGCCAATCAGCGG |
| | | AACATCGAGGACATCTGTATCTGCTGTGGCAGCCTGCAGGTGCACACACAG |
| | | CACCCACTGTTCGAGGGAGGAATCTGCGCACCCTGTAAGGATAAGTTCCTG |
| | | GACGCCCTGTTTCTGTACGACGATGACGGCTACCAGTCCTATTGCTCTATC |
| | | TGCTGTTCCGGCGAGACCCTGCTGATCTGCGGCAATCCAGATTGTACAAGG |
| | | TGCTATTGTTTTGAGTGCGTGGACTCTCTGGTGGGACCAGGCACCAGCGGA |
| | | AAGGTGCACGCCATGTCCAACTGGGTGTGCTACCTGTGCCTGCCATCCTCT |
| | | CGCAGCGGACTGCTGCAGCGGAGAAGGAAGTGGAGATCCCAGCTGAAGGCC |
| | | TTCTATGATAGGGAGTCTGAGAACCCCCTGGAGATGTTTGAGACCGTGCCA |
| | | GTGTGGCGCCGGCAGCCCGTGAGGGTGCTGAGCCTGTTCGAGGATATCAAG |
| | | AAGGAGCTGACATCCCTGGGCTTTCTGGAGTCCGGCTCTGACCCCGGACAG |
| | | CTGAAGCACGTGGTGGATGTGACCGACACAGTGCGGAAGGATGTGGAGGAG |
| | | TGGGGCCCTTTCGACCTGGTGTACGGAGCAACCCCTCCACTGGGACACACA |
| | | TGCGACAGACCCCCTTCTTGGTACCTGTTCCAGTTTCACCGCCTGCTGCAG |
| | | TATGCAAGGCCAAAGCCAGGCAGCCCTAGACCATTCTTTTGGATGTTCGTG |
| | | GATAATCTGGTGCTGAACAAGGAGGATCTGGACGTGGCCAGCAGGTTTCTG |
| | | GAGATGGAGCCAGTGACCATCCCAGACGTGCACGGCGGCTCCCTGCAGAAT |
| | | GCCGTGCGCGTGTGGTCTAACATCCCTGCCATCAGAAGCAGGCACTGGGCA |
| | | CTGGTGAGCGAGGAGGAGCTGTCCCTGCTGGCCCAGAATAAGCAGAGCAGC |
| | | AAGCTGGCCGCCAAGTGGCCTACAAAGCTGGTGAAGAACTGCTTCCTGCCA |
| | | CTGCGGGAGTACTTCAAGTATTTTTCCACCGAGCTGACATCTAGCCTGGGA |
| | | GGACCCTCCTCTGGCGCCCCACCACCTAGCGGCGGCTCCCCTGCCGGCTCT |
| | | CCAACCAGCACAGAGGAGGGCACCAGCGAGTCCGCCACACCAGAGTCTGGA |
| | | CCTGGCACCAGCACAGAGCCATCCGAGGGCTCTGCCCCAGGCTCTCCTGCA |
| | | GGCAGCCCTACCTCCACCGAAGAGGGCACCAGCACAGAGCCTTCTGAGGGC |
| | | AGCGCCCCAGGCACCTCTACAGAGCCAAGCGAGCTCGAGGACAAGAAGTAC |
| | | AGCATCGGCCTGGCCATCGGCACCAACTCTGTGGGCTGGGCCGTGATCACC |
| | | GACGAGTACAAGGTGCCCAGCAAGAAATTCAAGGTGCTGGGCAACACCGAC |
| | | CGGCACAGCATCAAGAAGAACCTGATCGGAGCCCTGCTGTTCGACAGCGGC |
| | | GAAACAGCCGAGGCCACCCGGCTGAAGAGAACCGCCAGAAGAAGATACACC |
| | | AGACGGAAGAACCGGATCTGCTATCTGCAAGAGATCTTCAGCAACGAGATG |
| | | GCCAAGGTGGACGACAGCTTCTTCCACAGACTGGAAGAGTCCTTCCTGGTG |
| | | GAAGAGGATAAGAAGCACGAGCGGCACCCCATCTTCGGCAACATCGTGGAC |
| | | GAGGTGGCCTACCACGAGAAGTACCCCACCATCTACCACCTGAGAAAGAAA |
| | | CTGGTGGACAGCACCGACAAGGCCGACCTGCGGCTGATCTATCTGGCCCTG |
| | | GCCCACATGATCAAGTTCCGGGGCCACTTCCTGATCGAGGGCGACCTGAAC |
| | | CCCGACAACAGCGACGTGGACAAGCTGTTCATCCAGCTGGTGCAGACCTAC |
| | | AACCAGCTGTTCGAGGAAAACCCCATCAACGCCAGCGGCGTGGACGCCAAG |
| | | GCCATCCTGTCTGCCAGACTGAGCAAGAGCAGACGGCTGGAAAATCTGATC |
| | | GCCCAGCTGCCCGGCGAGAAGAAGAATGGCCTGTTCGGCAACCTGATTGCC |
| | | CTGAGCCTGGGCCTGACCCCCAACTTCAAGAGCAACTTCGACCTGGCCGAG |
| | | GATGCCAAACTGCAGCTGAGCAAGGACACCTACGACGACGACCTGGACAAC |
| | | CTGCTGGCCCAGATCGGCGACCAGTACGCCGACCTGTTTCTGGCCGCCAAG |
| | | AACCTGTCCGACGCCATCCTGCTGAGCGACATCCTGAGAGTGAACACCGAG |
| | | ATCACCAAGGCCCCCCTGAGCGCCTCTATGATCAAGAGATACGACGAGCAC |
| | | CACCAGGACCTGACCCTGCTGAAAGCTCTCGTGCGGCAGCAGCTGCCTGAG |
| | | AAGTACAAAGAGATTTTCTTCGACCAGAGCAAGAACGGCTACGCCGGCTAC |
| | | ATTGACGGCGGAGCCAGCCAGGAAGAGTTCTACAAGTTCATCAAGCCCATC |
| | | CTGGAAAAGATGGACGGCACCGAGGAACTGCTCGTGAAGCTGAACAGAGAG |
| | | GACCTGCTGCGGAAGCAGCGGACCTTCGACAACGGCAGCATCCCCCACCAG |
| | | ATCCACCTGGGAGAGCTGCACGCCATTCTGCGGCGGCAGGAAGATTTTTAC |
| | | CCATTCCTGAAGGACAACCGGGAAAAGATCGAGAAGATCCTGACCTTCCGC |
| | | ATCCCCTACTACGTGGGCCCTCTGGCCAGGGGAAACAGCAGATTCGCCTGG |
| | | ATGACCAGAAAGAGCGAGGAAACCATCACCCCCTGGAACTTCGAGGAAGTG |
| | | GTGGACAAGGGCGCTTCCGCCCAGAGCTTCATCGAGCGGATGACCAACTTC |
| | | GATAAGAACCTGCCCAACGAGAAGGTGCTGCCCAAGCACAGCCTGCTGTAC |
| | | GAGTACTTCACCGTGTATAACGAGCTGACCAAAGTGAAATACGTGACCGAG |
| | | GGAATGAGAAAGCCCGCCTTCCTGAGCGGCGAGCAGAAAAAGGCCATCGTG |
| | | GACCTGCTGTTCAAGACCAACCGGAAAGTGACCGTGAAGCAGCTGAAAGAG |
| | | GACTACTTCAAGAAAATCGAGTGCTTCGACTCCGTGGAAATCTCCGGCGTG |
| | | GAAGATCGGTTCAACGCCTCCCTGGGCACATACCACGATCTGCTGAAAATT |
| | | ATCAAGGACAAGGACTTCCTGGACAATGAGGAAAACGAGGACATTCTGGAA |
| | | GATATCGTGCTGACCCTGACACTGTTTGAGGACAGAGAGATGATCGAGGAA |
| | | CGGCTGAAAACCTATGCCCACCTGTTCGACGACAAAGTGATGAAGCAGCTG |
| | | AAGCGGCGGAGATACACCGGCTGGGGCAGGCTGAGCCGGAAGCTGATCAAC |
| | | GGCATCCGGGACAAGCAGTCCGGCAAGACAATCCTGGATTTCCTGAAGTCC |
| | | GACGGCTTCGCCAACAGAAACTTCATGCAGCTGATCCACGACGACAGCCTG |
| | | ACCTTTAAAGAGGACATCCAGAAAGCCCAGGTGTCCGGCCAGGGCGATAGC |
| | | CTGCACGAGCACATTGCCAATCTGGCCGGCAGCCCCGCCATTAAGAAGGGC |
| | | ATCCTGCAGACAGTGAAGGTGGTGGACGAGCTCGTGAAAGTGATGGGCCGG |
| | | CACAAGCCCGAGAACATCGTGATCGAAATGGCCAGAGAGAACCAGACCACC |
| | | CAGAAGGGACAGAAGAACAGCCGCGAGAGAATGAAGCGGATCGAAGAGGGC |
| | | ATCAAAGAGCTGGGCAGCCAGATCCTGAAAGAACACCCCGTGGAAAACACC |
| | | CAGCTGCAGAACGAGAAGCTGTACCTGTACTACCTGCAGAATGGGCGGGAT |
| | | ATGTACGTGGACCAGGAACTGGACATCAACCGGCTGTCCGACTACGATGTG |
| | | GACGCCATCGTGCCTCAGAGCTTTCTGAAGGACGACTCCATCGACAACAAG |
| | | GTGCTGACCAGAAGCGACAAGAACCGGGGCAAGAGCGACAACGTGCCCTCC |
| | | GAAGAGGTCGTGAAGAAGATGAAGAACTACTGGCGGCAGCTGCTGAACGCC |
| | | AAGCTGATTACCCAGAGAAAGTTCGACAATCTGACCAAGGCCGAGAGAGGC |
| | | GGCCTGAGCGAACTGGATAAGGCCGGCTTCATCAAGAGACAGCTGGTGGAA |
| | | ACCCGGCAGATCACAAAGCACGTGGCACAGATCCTGGACTCCCGGATGAAC |
| | | ACTAAGTACGACGAGAATGACAAGCTGATCCGGGAAGTGAAAGTGATCACC |
| | | CTGAAGTCCAAGCTGGTGTCCGATTTCCGGAAGGATTTCCAGTTTTACAAA |
| | | GTGCGCGAGATCAACAACTACCACCACGCCCACGACGCCTACCTGAACGCC |
| | | GTCGTGGGAACCGCCCTGATCAAAAAGTACCCTAAGCTGGAAAGCGAGTTC |
| | | GTGTACGGCGACTACAAGGTGTACGACGTGCGGAAGATGATCGCCAAGAGC |
| | | GAGCAGGAAATCGGCAAGGCTACCGCCAAGTACTTCTTCTACAGCAACATC |
| | | ATGAACTTTTTCAAGACCGAGATTACCCTGGCCAACGGCGAGATCCGGAAG |
| | | CGGCCTCTGATCGAGACAAACGGCGAAACCGGGGAGATCGTGTGGGATAAG |
| | | GGCCGGGATTTTGCCACCGTGCGGAAAGTGCTGAGCATGCCCCAAGTGAAT |
| | | ATCGTGAAAAAGACCGAGGTGCAGACAGGCGGCTTCAGCAAAGAGTCTATC |
| | | CTGCCCAAGAGGAACAGCGATAAGCTGATCGCCAGAAAGAAGGACTGGGAC |
| | | CCTAAGAAGTACGGCGGCTTCGACAGCCCCACCGTGGCCTATTCTGTGCTG |
| | | GTGGTGGCCAAAGTGGAAAAGGGCAAGTCCAAGAAACTGAAGAGTGTGAAA |
| | | GAGCTGCTGGGGATCACCATCATGGAAAGAAGCAGCTTCGAGAAGAATCCC |
| | | ATCGACTTTCTGGAAGCCAAGGGCTACAAAGAAGTGAAAAAGGACCTGATC |
| | | ATCAAGCTGCCTAAGTACTCCCTGTTCGAGCTGGAAAACGGCCGGAAGAGA |
| | | ATGCTGGCCTCTGCCGGCGAACTGCAGAAGGGAAACGAACTGGCCCTGCCC |
| | | TCCAAATATGTGAACTTCCTGTACCTGGCCAGCCACTATGAGAAGCTGAAG |
| | | GGCTCCCCCGAGGATAATGAGCAGAAACAGCTGTTTGTGGAACAGCACAAG |
| | | CACTACCTGGACGAGATCATCGAGCAGATCAGCGAGTTCTCCAAGAGAGTG |
| | | ATCCTGGCCGACGCTAATCTGGACAAAGTGCTGTCCGCCTACAACAAGCAC |
| | | CGGGATAAGCCCATCAGAGAGCAGGCCGAGAATATCATCCACCTGTTTACC |
| | | CTGACCAATCTGGGAGCCCCTGCCGCCTTCAAGTACTTTGACACCACCATC |
| | | GACCGGAAGAGGTACACCAGCACCAAAGAGGTGCTGGACGCCACCCTGATC |
| | | CACCAGAGCATCACCGGCCTGTACGAGACACGGATCGACCTGTCTCAGCTG |
| | | GGAGGCGACAGCCCCAAGAAGAAGAGAAAGGTGGGAGTCGACGGATCCAGC |
| | | GGCTCCGAGACCCCAGGCACATCTGAGAGCGCCACCCCTGAGTCCACCGGT |
| | | GACTCCGTTGCTTTCGAGGACGTGGCCGTGAACTTCACACTTGAGGAATGG |
| | | GCCTTGCTCGACCCAAGTCAGAAGAATCTGTACAGAGACGTGATGCGGGAG |
| | | ACATTCAGGAATCTCGCCAGTGTCGGAAAGCAGTGGGAAGACCAGAACATC |
| | | GAAGATCCTTTCAAGATACCACGGCGCAATATCTCCCACATTCCTGAGAGG |
| | | CTGTGTGAATCTAAGGAAGGCGGACAAGGTGAGGAAAGCGCTGATTACAAA |
| | | GATGATGACGATAAAGCCCCCAAGAAGAAAAGGAAGGTCCCAAAGAAAAAA |
| | | AGAAAGGTGTGA |
| 483 | PLA002 | MPKKKRKVPKKKRKVYNHDQEFDPPKVYPPVPAEKRKPIRVLSLFDGIATG |
| | Amino acid | LLVLKDLGIQVDRYIASEVCEDSITVGMVRHQGKIMYVGDVRSVTQKHIQE |
| | sequence | WGPFDLVIGGSPCNDLSIVNPARKGLYEGTGRLFFEFYRLLHDARPKEGDD |
| | | RPFFWLFENVVAMGVSDKRDISRFLESNPVMIDAKEVSAAHRARYFWGNLP |
| | | GMNRPLASTVNDKLELQECLEHGRIAKFSKVRTITTRSNSIKQGKDQHFPV |
| | | FMNEKEDILWCTEMERVFGFPVHYTDVSNMSRLARQRLLGRSWSVPVIRHL |
| | | FAPLKEYFACVSSGNSNANSRGPSFSSGLVPLSLRGSHMAAIPALDPEAEP |
| | | SMDVILVGSSELSSSVSPGTGRDLIAYEVKANQRNIEDICICCGSLQVHTQ |
| | | HPLFEGGICAPCKDKFLDALFLYDDDGYQSYCSICCSGETLLICGNPDCTR |
| | | CYCFECVDSLVGPGTSGKVHAMSNWVCYLCLPSSRSGLLQRRRKWRSQLKA |
| | | FYDRESENPLEMFETVPVWRRQPVRVLSLFEDIKKELTSLGFLESGSDPGQ |
| | | LKHVVDVTDTVRKDVEEWGPFDLVYGATPPLGHTCDRPPSWYLFQFHRLLQ |
| | | YARPKPGSPRPFFWMFVDNLVLNKEDLDVASRFLEMEPVTIPDVHGGSLQN |
| | | AVRVWSNIPAIRSRHWALVSEEELSLLAQNKQSSKLAAKWPTKLVKNCFLP |
| | | LREYFKYFSTELTSSLGGPSSGAPPPSGGSPAGSPTSTEEGTSESATPESG |
| | | PGTSTEPSEGSAPGSPAGSPTSTEEGTSTEPSEGSAPGTSTEPSELEDKKY |
| | | SIGLAIGTNSVGWAVITDEYKVPSKKFKVLGNTDRHSIKKNLIGALLFDSG |
| | | ETAEATRLKRTARRRYTRRKNRICYLQEIFSNEMAKVDDSFFHRLEESFLV |
| | | EEDKKHERHPIFGNIVDEVAYHEKYPTIYHLRKKLVDSTDKADLRLIYLAL |
| | | AHMIKFRGHFLIEGDLNPDNSDVDKLFIQLVQTYNQLFEENPINASGVDAK |
| | | AILSARLSKSRRLENLIAQLPGEKKNGLFGNLIALSLGLTPNFKSNFDLAE |
| | | DAKLQLSKDTYDDDLDNLLAQIGDQYADLFLAAKNLSDAILLSDILRVNTE |
| | | ITKAPLSASMIKRYDEHHQDLTLLKALVRQQLPEKYKEIFFDQSKNGYAGY |
| | | IDGGASQEEFYKFIKPILEKMDGTEELLVKLNREDLLRKQRTFDNGSIPHQ |
| | | IHLGELHAILRRQEDFYPFLKDNREKIEKILTFRIPYYVGPLARGNSRFAW |
| | | MTRKSEETITPWNFEEVVDKGASAQSFIERMTNFDKNLPNEKVLPKHSLLY |
| | | EYFTVYNELTKVKYVTEGMRKPAFLSGEQKKAIVDLLFKTNRKVTVKQLKE |
| | | DYFKKIECFDSVEISGVEDRFNASLGTYHDLLKIIKDKDFLDNEENEDILE |
| | | DIVLTLTLFEDREMIEERLKTYAHLFDDKVMKQLKRRRYTGWGRLSRKLIN |
| | | GIRDKQSGKTILDFLKSDGFANRNFMQLIHDDSLTFKEDIQKAQVSGQGDS |
| | | LHEHIANLAGSPAIKKGILQTVKVVDELVKVMGRHKPENIVIEMARENQTT |
| | | QKGQKNSRERMKRIEEGIKELGSQILKEHPVENTQLQNEKLYLYYLQNGRD |
| | | MYVDQELDINRLSDYDVDAIVPQSFLKDDSIDNKVLTRSDKNRGKSDNVPS |
| | | EEVVKKMKNYWRQLLNAKLITQRKFDNLTKAERGGLSELDKAGFIKRQLVE |
| | | TRQITKHVAQILDSRMNTKYDENDKLIREVKVITLKSKLVSDFRKDFQFYK |
| | | VREINNYHHAHDAYLNAVVGTALIKKYPKLESEFVYGDYKVYDVRKMIAKS |
| | | EQEIGKATAKYFFYSNIMNFFKTEITLANGEIRKRPLIETNGETGEIVWDK |
| | | GRDFATVRKVLSMPQVNIVKKTEVQTGGFSKESILPKRNSDKLIARKKDWD |
| | | PKKYGGFDSPTVAYSVLVVAKVEKGKSKKLKSVKELLGITIMERSSFEKNP |
| | | IDFLEAKGYKEVKKDLIIKLPKYSLFELENGRKRMLASAGELQKGNELALP |
| | | SKYVNFLYLASHYEKLKGSPEDNEQKQLFVEQHKHYLDEIIEQISEFSKRV |
| | | ILADANLDKVLSAYNKHRDKPIREQAENIIHLFTLTNLGAPAAFKYFDTTI |
| | | DRKRYTSTKEVLDATLIHQSITGLYETRIDLSQLGGDSPKKKRKVGVDGSS |
| | | GSETPGTSESATPESTGMNNSQGRVTFEDVTVNFTQGEWQRLNPEQRNLYR |
| | | DVMLENYSNLVSVGQGETTKPDVILRLEQGKEPWLEEEEVLGSGRAEKNGD |
| | | IGGQIWKPKDVKESLSADYKDDDDKAPKKKRKVPKKKRKV |
| 484 | PLA002 | ATGCCAAAAAAGAAGAGAAAGGTACCGAAGAAAAAAAGAAAGGTATACAAT |
| | polynucleotide | CACGATCAGGAGTTCGACCCCCCTAAGGTGTACCCACCAGTGCCTGCAGAG |
| | sequence | AAGAGGAAGCCAATCCGGGTGCTGAGCCTGTTTGATGGCATCGCCACCGGC |
| | | CTGCTGGTGCTGAAGGATCTGGGCATCCAGGTGGACCGGTACATCGCCTCC |
| | | GAGGTGTGCGAGGATTCTATCACCGTGGGCATGGTGCGCCACCAGGGCAAG |
| | | ATCATGTATGTGGGCGACGTGCGGTCCGTGACACAGAAGCACATCCAGGAG |
| | | TGGGGCCCATTCGATCTGGTGATCGGCGGCAGCCCCTGTAATGACCTGTCC |
| | | ATCGTGAACCCTGCAAGGAAGGGACTGTACGAGGGAACCGGCCGGCTGTTC |
| | | TTTGAGTTTTATAGACTGCTGCACGACGCCAGGCCTAAGGAGGGCGACGAT |
| | | AGACCATTCTTTTGGCTGTTCGAGAATGTGGTGGCTATGGGCGTGAGCGAT |
| | | AAGAGGGACATCTCCAGGTTTCTGGAGTCTAACCCCGTGATGATCGATGCA |
| | | AAGGAGGTGTCCGCCGCACACAGAGCCAGGTATTTCTGGGGCAATCTGCCA |
| | | GGAATGAACAGGCCACTGGCAAGCACCGTGAATGACAAGCTGGAGCTGCAG |
| | | GAGTGCCTGGAGCACGGAAGGATCGCCAAGTTTTCCAAGGTGCGCACAATC |
| | | ACCACACGGAGCAATTCCATCAAGCAGGGCAAGGATCAGCACTTCCCCGTG |
| | | TTCATGAACGAGAAGGAGGACATCCTGTGGTGTACCGAGATGGAGAGAGTG |
| | | TTCGGCTTTCCAGTGCACTACACAGACGTGTCTAACATGAGCAGGCTGGCA |
| | | AGGCAGCGGCTGCTGGGCAGATCTTGGAGCGTGCCCGTGATCAGGCACCTG |
| | | TTCGCCCCTCTGAAGGAGTATTTTGCCTGCGTGAGCAGCGGCAACTCCAAT |
| | | GCCAACAGCCGGGGCCCCTCTTTCAGCTCCGGATTGGTGCCTCTGAGCCTG |
| | | AGGGGCTCCCACATGGCAGCAATCCCCGCCCTGGACCCCGAGGCCGAGCCT |
| | | AGCATGGACGTGATCCTGGTGGGCTCTAGCGAGCTGTCCTCTAGCGTGTCT |
| | | CCAGGAACCGGAAGGGATCTGATCGCATACGAGGTGAAGGCCAATCAGCGG |
| | | AACATCGAGGACATCTGTATCTGCTGTGGCAGCCTGCAGGTGCACACACAG |
| | | CACCCACTGTTCGAGGGAGGAATCTGCGCACCCTGTAAGGATAAGTTCCTG |
| | | GACGCCCTGTTTCTGTACGACGATGACGGCTACCAGTCCTATTGCTCTATC |
| | | TGCTGTTCCGGCGAGACCCTGCTGATCTGCGGCAATCCAGATTGTACAAGG |
| | | TGCTATTGTTTTGAGTGCGTGGACTCTCTGGTGGGACCAGGCACCAGCGGA |
| | | AAGGTGCACGCCATGTCCAACTGGGTGTGCTACCTGTGCCTGCCATCCTCT |
| | | CGCAGCGGACTGCTGCAGCGGAGAAGGAAGTGGAGATCCCAGCTGAAGGCC |
| | | TTCTATGATAGGGAGTCTGAGAACCCCCTGGAGATGTTTGAGACCGTGCCA |
| | | GTGTGGCGCCGGCAGCCCGTGAGGGTGCTGAGCCTGTTCGAGGATATCAAG |
| | | AAGGAGCTGACATCCCTGGGCTTTCTGGAGTCCGGCTCTGACCCCGGACAG |
| | | CTGAAGCACGTGGTGGATGTGACCGACACAGTGCGGAAGGATGTGGAGGAG |
| | | TGGGGCCCTTTCGACCTGGTGTACGGAGCAACCCCTCCACTGGGACACACA |
| | | TGCGACAGACCCCCTTCTTGGTACCTGTTCCAGTTTCACCGCCTGCTGCAG |
| | | TATGCAAGGCCAAAGCCAGGCAGCCCTAGACCATTCTTTTGGATGTTCGTG |
| | | GATAATCTGGTGCTGAACAAGGAGGATCTGGACGTGGCCAGCAGGTTTCTG |
| | | GAGATGGAGCCAGTGACCATCCCAGACGTGCACGGCGGCTCCCTGCAGAAT |
| | | GCCGTGCGCGTGTGGTCTAACATCCCTGCCATCAGAAGCAGGCACTGGGCA |
| | | CTGGTGAGCGAGGAGGAGCTGTCCCTGCTGGCCCAGAATAAGCAGAGCAGC |
| | | AAGCTGGCCGCCAAGTGGCCTACAAAGCTGGTGAAGAACTGCTTCCTGCCA |
| | | CTGCGGGAGTACTTCAAGTATTTTTCCACCGAGCTGACATCTAGCCTGGGA |
| | | GGACCCTCCTCTGGCGCCCCACCACCTAGCGGCGGCTCCCCTGCCGGCTCT |
| | | CCAACCAGCACAGAGGAGGGCACCAGCGAGTCCGCCACACCAGAGTCTGGA |
| | | CCTGGCACCAGCACAGAGCCATCCGAGGGCTCTGCCCCAGGCTCTCCTGCA |
| | | GGCAGCCCTACCTCCACCGAAGAGGGCACCAGCACAGAGCCTTCTGAGGGC |
| | | AGCGCCCCAGGCACCTCTACAGAGCCAAGCGAGCTCGAGGACAAGAAGTAC |
| | | AGCATCGGCCTGGCCATCGGCACCAACTCTGTGGGCTGGGCCGTGATCACC |
| | | GACGAGTACAAGGTGCCCAGCAAGAAATTCAAGGTGCTGGGCAACACCGAC |
| | | CGGCACAGCATCAAGAAGAACCTGATCGGAGCCCTGCTGTTCGACAGCGGC |
| | | GAAACAGCCGAGGCCACCCGGCTGAAGAGAACCGCCAGAAGAAGATACACC |
| | | AGACGGAAGAACCGGATCTGCTATCTGCAAGAGATCTTCAGCAACGAGATG |
| | | GCCAAGGTGGACGACAGCTTCTTCCACAGACTGGAAGAGTCCTTCCTGGTG |
| | | GAAGAGGATAAGAAGCACGAGCGGCACCCCATCTTCGGCAACATCGTGGAC |
| | | GAGGTGGCCTACCACGAGAAGTACCCCACCATCTACCACCTGAGAAAGAAA |
| | | CTGGTGGACAGCACCGACAAGGCCGACCTGCGGCTGATCTATCTGGCCCTG |
| | | GCCCACATGATCAAGTTCCGGGGCCACTTCCTGATCGAGGGCGACCTGAAC |
| | | CCCGACAACAGCGACGTGGACAAGCTGTTCATCCAGCTGGTGCAGACCTAC |
| | | AACCAGCTGTTCGAGGAAAACCCCATCAACGCCAGCGGCGTGGACGCCAAG |
| | | GCCATCCTGTCTGCCAGACTGAGCAAGAGCAGACGGCTGGAAAATCTGATC |
| | | GCCCAGCTGCCCGGCGAGAAGAAGAATGGCCTGTTCGGCAACCTGATTGCC |
| | | CTGAGCCTGGGCCTGACCCCCAACTTCAAGAGCAACTTCGACCTGGCCGAG |
| | | GATGCCAAACTGCAGCTGAGCAAGGACACCTACGACGACGACCTGGACAAC |
| | | CTGCTGGCCCAGATCGGCGACCAGTACGCCGACCTGTTTCTGGCCGCCAAG |
| | | AACCTGTCCGACGCCATCCTGCTGAGCGACATCCTGAGAGTGAACACCGAG |
| | | ATCACCAAGGCCCCCCTGAGCGCCTCTATGATCAAGAGATACGACGAGCAC |
| | | CACCAGGACCTGACCCTGCTGAAAGCTCTCGTGCGGCAGCAGCTGCCTGAG |
| | | AAGTACAAAGAGATTTTCTTCGACCAGAGCAAGAACGGCTACGCCGGCTAC |
| | | ATTGACGGCGGAGCCAGCCAGGAAGAGTTCTACAAGTTCATCAAGCCCATC |
| | | CTGGAAAAGATGGACGGCACCGAGGAACTGCTCGTGAAGCTGAACAGAGAG |
| | | GACCTGCTGCGGAAGCAGCGGACCTTCGACAACGGCAGCATCCCCCACCAG |
| | | ATCCACCTGGGAGAGCTGCACGCCATTCTGCGGCGGCAGGAAGATTTTTAC |
| | | CCATTCCTGAAGGACAACCGGGAAAAGATCGAGAAGATCCTGACCTTCCGC |
| | | ATCCCCTACTACGTGGGCCCTCTGGCCAGGGGAAACAGCAGATTCGCCTGG |
| | | ATGACCAGAAAGAGCGAGGAAACCATCACCCCCTGGAACTTCGAGGAAGTG |
| | | GTGGACAAGGGCGCTTCCGCCCAGAGCTTCATCGAGCGGATGACCAACTTC |
| | | GATAAGAACCTGCCCAACGAGAAGGTGCTGCCCAAGCACAGCCTGCTGTAC |
| | | GAGTACTTCACCGTGTATAACGAGCTGACCAAAGTGAAATACGTGACCGAG |
| | | GGAATGAGAAAGCCCGCCTTCCTGAGCGGCGAGCAGAAAAAGGCCATCGTG |
| | | GACCTGCTGTTCAAGACCAACCGGAAAGTGACCGTGAAGCAGCTGAAAGAG |
| | | GACTACTTCAAGAAAATCGAGTGCTTCGACTCCGTGGAAATCTCCGGCGTG |
| | | GAAGATCGGTTCAACGCCTCCCTGGGCACATACCACGATCTGCTGAAAATT |
| | | ATCAAGGACAAGGACTTCCTGGACAATGAGGAAAACGAGGACATTCTGGAA |
| | | GATATCGTGCTGACCCTGACACTGTTTGAGGACAGAGAGATGATCGAGGAA |
| | | CGGCTGAAAACCTATGCCCACCTGTTCGACGACAAAGTGATGAAGCAGCTG |
| | | AAGCGGCGGAGATACACCGGCTGGGGCAGGCTGAGCCGGAAGCTGATCAAC |
| | | GGCATCCGGGACAAGCAGTCCGGCAAGACAATCCTGGATTTCCTGAAGTCC |
| | | GACGGCTTCGCCAACAGAAACTTCATGCAGCTGATCCACGACGACAGCCTG |
| | | ACCTTTAAAGAGGACATCCAGAAAGCCCAGGTGTCCGGCCAGGGCGATAGC |
| | | CTGCACGAGCACATTGCCAATCTGGCCGGCAGCCCCGCCATTAAGAAGGGC |
| | | ATCCTGCAGACAGTGAAGGTGGTGGACGAGCTCGTGAAAGTGATGGGCCGG |
| | | CACAAGCCCGAGAACATCGTGATCGAAATGGCCAGAGAGAACCAGACCACC |
| | | CAGAAGGGACAGAAGAACAGCCGCGAGAGAATGAAGCGGATCGAAGAGGGC |
| | | ATCAAAGAGCTGGGCAGCCAGATCCTGAAAGAACACCCCGTGGAAAACACC |
| | | CAGCTGCAGAACGAGAAGCTGTACCTGTACTACCTGCAGAATGGGCGGGAT |
| | | ATGTACGTGGACCAGGAACTGGACATCAACCGGCTGTCCGACTACGATGTG |
| | | GACGCCATCGTGCCTCAGAGCTTTCTGAAGGACGACTCCATCGACAACAAG |
| | | GTGCTGACCAGAAGCGACAAGAACCGGGGCAAGAGCGACAACGTGCCCTCC |
| | | GAAGAGGTCGTGAAGAAGATGAAGAACTACTGGCGGCAGCTGCTGAACGCC |
| | | AAGCTGATTACCCAGAGAAAGTTCGACAATCTGACCAAGGCCGAGAGAGGC |
| | | GGCCTGAGCGAACTGGATAAGGCCGGCTTCATCAAGAGACAGCTGGTGGAA |
| | | ACCCGGCAGATCACAAAGCACGTGGCACAGATCCTGGACTCCCGGATGAAC |
| | | ACTAAGTACGACGAGAATGACAAGCTGATCCGGGAAGTGAAAGTGATCACC |
| | | CTGAAGTCCAAGCTGGTGTCCGATTTCCGGAAGGATTTCCAGTTTTACAAA |
| | | GTGCGCGAGATCAACAACTACCACCACGCCCACGACGCCTACCTGAACGCC |
| | | GTCGTGGGAACCGCCCTGATCAAAAAGTACCCTAAGCTGGAAAGCGAGTTC |
| | | GTGTACGGCGACTACAAGGTGTACGACGTGCGGAAGATGATCGCCAAGAGC |
| | | GAGCAGGAAATCGGCAAGGCTACCGCCAAGTACTTCTTCTACAGCAACATC |
| | | ATGAACTTTTTCAAGACCGAGATTACCCTGGCCAACGGCGAGATCCGGAAG |
| | | CGGCCTCTGATCGAGACAAACGGCGAAACCGGGGAGATCGTGTGGGATAAG |
| | | GGCCGGGATTTTGCCACCGTGCGGAAAGTGCTGAGCATGCCCCAAGTGAAT |
| | | ATCGTGAAAAAGACCGAGGTGCAGACAGGCGGCTTCAGCAAAGAGTCTATC |
| | | CTGCCCAAGAGGAACAGCGATAAGCTGATCGCCAGAAAGAAGGACTGGGAC |
| | | CCTAAGAAGTACGGCGGCTTCGACAGCCCCACCGTGGCCTATTCTGTGCTG |
| | | GTGGTGGCCAAAGTGGAAAAGGGCAAGTCCAAGAAACTGAAGAGTGTGAAA |
| | | GAGCTGCTGGGGATCACCATCATGGAAAGAAGCAGCTTCGAGAAGAATCCC |
| | | ATCGACTTTCTGGAAGCCAAGGGCTACAAAGAAGTGAAAAAGGACCTGATC |
| | | ATCAAGCTGCCTAAGTACTCCCTGTTCGAGCTGGAAAACGGCCGGAAGAGA |
| | | ATGCTGGCCTCTGCCGGCGAACTGCAGAAGGGAAACGAACTGGCCCTGCCC |
| | | TCCAAATATGTGAACTTCCTGTACCTGGCCAGCCACTATGAGAAGCTGAAG |
| | | GGCTCCCCCGAGGATAATGAGCAGAAACAGCTGTTTGTGGAACAGCACAAG |
| | | CACTACCTGGACGAGATCATCGAGCAGATCAGCGAGTTCTCCAAGAGAGTG |
| | | ATCCTGGCCGACGCTAATCTGGACAAAGTGCTGTCCGCCTACAACAAGCAC |
| | | CGGGATAAGCCCATCAGAGAGCAGGCCGAGAATATCATCCACCTGTTTACC |
| | | CTGACCAATCTGGGAGCCCCTGCCGCCTTCAAGTACTTTGACACCACCATC |
| | | GACCGGAAGAGGTACACCAGCACCAAAGAGGTGCTGGACGCCACCCTGATC |
| | | CACCAGAGCATCACCGGCCTGTACGAGACACGGATCGACCTGTCTCAGCTG |
| | | GGAGGCGACAGCCCCAAGAAGAAGAGAAAGGTGGGAGTCGACGGATCCAGC |
| | | GGCTCCGAGACCCCAGGCACATCTGAGAGCGCCACCCCTGAGTCCACCGGT |
| | | ATGAACAATTCACAGGGGAGAGTGACATTCGAAGACGTGACCGTGAACTTC |
| | | ACCCAGGGAGAATGGCAGCGCTTGAACCCAGAACAAAGGAACCTCTATCGG |
| | | GACGTGATGCTGGAAAACTACTCAAATTTGGTGAGCGTTGGGCAGGGTGAG |
| | | ACCACTAAGCCTGACGTGATCCTGAGATTGGAACAGGGCAAGGAGCCTTGG |
| | | CTCGAGGAAGAGGAAGTCCTGGGCTCAGGGAGGGCCGAGAAAAACGGTGAT |
| | | ATAGGAGGCCAGATATGGAAGCCTAAGGACGTCAAGGAGAGCCTGAGCGCT |
| | | GATTACAAAGATGATGACGATAAAGCCCCCAAGAAGAAAAGGAAGGTCCCA |
| | | AAGAAAAAAAGAAAGGTGTGA |
| 492 | PLA003 amino | MPKKKRKVPKKKRKVYNHDQEFDPPKVYPPVPAEKRKPIRVLSLFDGIATG |
| | acid sequence | LLVLKDLGIQVDRYIASEVCEDSITVGMVRHQGKIMYVGDVRSVTQKHIQE |
| | | WGPFDLVIGGSPCNDLSIVNPARKGLYEGTGRLFFEFYRLLHDARPKEGDD |
| | | RPFFWLFENVVAMGVSDKRDISRFLESNPVMIDAKEVSAAHRARYFWGNLP |
| | | GMNRPLASTVNDKLELQECLEHGRIAKFSKVRTITTRSNSIKQGKDQHFPV |
| | | FMNEKEDILWCTEMERVFGFPVHYTDVSNMSRLARQRLLGRSWSVPVIRHL |
| | | FAPLKEYFACVSSGNSNANSRGPSFSSGLVPLSLRGSHMAAIPALDPEAEP |
| | | SMDVILVGSSELSSSVSPGTGRDLIAYEVKANQRNIEDICICCGSLQVHTQ |
| | | HPLFEGGICAPCKDKFLDALFLYDDDGYQSYCSICCSGETLLICGNPDCTR |
| | | CYCFECVDSLVGPGTSGKVHAMSNWVCYLCLPSSRSGLLQRRRKWRSQLKA |
| | | FYDRESENPLEMFETVPVWRRQPVRVLSLFEDIKKELTSLGFLESGSDPGQ |
| | | LKHVVDVTDTVRKDVEEWGPFDLVYGATPPLGHTCDRPPSWYLFQFHRLLQ |
| | | YARPKPGSPRPFFWMFVDNLVLNKEDLDVASRFLEMEPVTIPDVHGGSLQN |
| | | AVRVWSNIPAIRSRHWALVSEEELSLLAQNKQSSKLAAKWPTKLVKNCFLP |
| | | LREYFKYFSTELTSSLGGPSSGAPPPSGGSPAGSPTSTEEGTSESATPESG |
| | | PGTSTEPSEGSAPGSPAGSPTSTEEGTSTEPSEGSAPGTSTEPSELEDKKY |
| | | SIGLAIGTNSVGWAVITDEYKVPSKKFKVLGNTDRHSIKKNLIGALLFDSG |
| | | ETAEATRLKRTARRRYTRRKNRICYLQEIFSNEMAKVDDSFFHRLEESFLV |
| | | EEDKKHERHPIFGNIVDEVAYHEKYPTIYHLRKKLVDSTDKADLRLIYLAL |
| | | AHMIKFRGHFLIEGDLNPDNSDVDKLFIQLVQTYNQLFEENPINASGVDAK |
| | | AILSARLSKSRRLENLIAQLPGEKKNGLFGNLIALSLGLTPNFKSNFDLAE |
| | | DAKLQLSKDTYDDDLDNLLAQIGDQYADLFLAAKNLSDAILLSDILRVNTE |
| | | ITKAPLSASMIKRYDEHHQDLTLLKALVRQQLPEKYKEIFFDQSKNGYAGY |
| | | IDGGASQEEFYKFIKPILEKMDGTEELLVKLNREDLLRKQRTFDNGSIPHQ |
| | | IHLGELHAILRRQEDFYPFLKDNREKIEKILTFRIPYYVGPLARGNSRFAW |
| | | MTRKSEETITPWNFEEVVDKGASAQSFIERMTNFDKNLPNEKVLPKHSLLY |
| | | EYFTVYNELTKVKYVTEGMRKPAFLSGEQKKAIVDLLFKTNRKVTVKQLKE |
| | | DYFKKIECFDSVEISGVEDRFNASLGTYHDLLKIIKDKDFLDNEENEDILE |
| | | DIVLTLTLFEDREMIEERLKTYAHLFDDKVMKQLKRRRYTGWGRLSRKLIN |
| | | GIRDKQSGKTILDFLKSDGFANRNFMQLIHDDSLTFKEDIQKAQVSGQGDS |
| | | LHEHIANLAGSPAIKKGILQTVKVVDELVKVMGRHKPENIVIEMARENQTT |
| | | QKGQKNSRERMKRIEEGIKELGSQILKEHPVENTQLQNEKLYLYYLQNGRD |
| | | MYVDQELDINRLSDYDVDAIVPQSFLKDDSIDNKVLTRSDKNRGKSDNVPS |
| | | EEVVKKMKNYWRQLLNAKLITQRKFDNLTKAERGGLSELDKAGFIKRQLVE |
| | | TRQITKHVAQILDSRMNTKYDENDKLIREVKVITLKSKLVSDFRKDFQFYK |
| | | VREINNYHHAHDAYLNAVVGTALIKKYPKLESEFVYGDYKVYDVRKMIAKS |
| | | EQEIGKATAKYFFYSNIMNFFKTEITLANGEIRKRPLIETNGETGEIVWDK |
| | | GRDFATVRKVLSMPQVNIVKKTEVQTGGFSKESILPKRNSDKLIARKKDWD |
| | | PKKYGGFDSPTVAYSVLVVAKVEKGKSKKLKSVKELLGITIMERSSFEKNP |
| | | IDFLEAKGYKEVKKDLIIKLPKYSLFELENGRKRMLASAGELQKGNELALP |
| | | SKYVNFLYLASHYEKLKGSPEDNEQKQLFVEQHKHYLDEIIEQISEFSKRV |
| | | ILADANLDKVLSAYNKHRDKPIREQAENIIHLFTLTNLGAPAAFKYFDTTI |
| | | DRKRYTSTKEVLDATLIHQSITGLYETRIDLSQLGGDSPKKKRKVGVDGSS |
| | | GSETPGTSESATPESTGMNNSQGRVTFEDVTVNFTQGEWQRLNPEQRNLYR |
| | | DVMLENYSNLVSVGQGETTKPDVILRLEQGKEPWLEEEEVLGSGRAEKNGD |
| | | IGGQIWKPKDVKESLSAPKKKRKVPKKKRKV |
| 493 | PLA003 full | GGGCGCTCGAGCAGGTTCAGAAGGAGATCAAAAACCCCCAAGGATCAAACA |
| | plasmid | TGCCAAAAAAGAAGAGAAAGGTACCGAAGAAAAAAAGAAAGGTATACAATC |
| | sequence | ACGATCAGGAGTTCGACCCCCCTAAGGTGTACCCACCAGTGCCTGCAGAGA |
| | | AGAGGAAGCCAATCCGGGTGCTGAGCCTGTTTGATGGCATCGCCACCGGCC |
| | | TGCTGGTGCTGAAGGATCTGGGCATCCAGGTGGACCGGTACATCGCCTCCG |
| | | AGGTGTGCGAGGATTCTATCACCGTGGGCATGGTGCGCCACCAGGGCAAGA |
| | | TCATGTATGTGGGCGACGTGCGGTCCGTGACACAGAAGCACATCCAGGAGT |
| | | GGGGCCCATTCGATCTGGTGATCGGCGGCAGCCCCTGTAATGACCTGTCCA |
| | | TCGTGAACCCTGCAAGGAAGGGACTGTACGAGGGAACCGGCCGGCTGTTCT |
| | | TTGAGTTTTATAGACTGCTGCACGACGCCAGGCCTAAGGAGGGCGACGATA |
| | | GACCATTCTTTTGGCTGTTCGAGAATGTGGTGGCTATGGGCGTGAGCGATA |
| | | AGAGGGACATCTCCAGGTTTCTGGAGTCTAACCCCGTGATGATCGATGCAA |
| | | AGGAGGTGTCCGCCGCACACAGAGCCAGGTATTTCTGGGGCAATCTGCCAG |
| | | GAATGAACAGGCCACTGGCAAGCACCGTGAATGACAAGCTGGAGCTGCAGG |
| | | AGTGCCTGGAGCACGGAAGGATCGCCAAGTTTTCCAAGGTGCGCACAATCA |
| | | CCACACGGAGCAATTCCATCAAGCAGGGCAAGGATCAGCACTTCCCCGTGT |
| | | TCATGAACGAGAAGGAGGACATCCTGTGGTGTACCGAGATGGAGAGAGTGT |
| | | TCGGCTTTCCAGTGCACTACACAGACGTGTCTAACATGAGCAGGCTGGCAA |
| | | GGCAGCGGCTGCTGGGCAGATCTTGGAGCGTGCCCGTGATCAGGCACCTGT |
| | | TCGCCCCTCTGAAGGAGTATTTTGCCTGCGTGAGCAGCGGCAACTCCAATG |
| | | CCAACAGCCGGGGCCCCTCTTTCAGCTCCGGATTGGTGCCTCTGAGCCTGA |
| | | GGGGCTCCCACATGGCAGCAATCCCCGCCCTGGACCCCGAGGCCGAGCCTA |
| | | GCATGGACGTGATCCTGGTGGGCTCTAGCGAGCTGTCCTCTAGCGTGTCTC |
| | | CAGGAACCGGAAGGGATCTGATCGCATACGAGGTGAAGGCCAATCAGCGGA |
| | | ACATCGAGGACATCTGTATCTGCTGTGGCAGCCTGCAGGTGCACACACAGC |
| | | ACCCACTGTTCGAGGGAGGAATCTGCGCACCCTGTAAGGATAAGTTCCTGG |
| | | ACGCCCTGTTTCTGTACGACGATGACGGCTACCAGTCCTATTGCTCTATCT |
| | | GCTGTTCCGGCGAGACCCTGCTGATCTGCGGCAATCCAGATTGTACAAGGT |
| | | GCTATTGTTTTGAGTGCGTGGACTCTCTGGTGGGACCAGGCACCAGCGGAA |
| | | AGGTGCACGCCATGTCCAACTGGGTGTGCTACCTGTGCCTGCCATCCTCTC |
| | | GCAGCGGACTGCTGCAGCGGAGAAGGAAGTGGAGATCCCAGCTGAAGGCCT |
| | | TCTATGATAGGGAGTCTGAGAACCCCCTGGAGATGTTTGAGACCGTGCCAG |
| | | TGTGGCGCCGGCAGCCCGTGAGGGTGCTGAGCCTGTTCGAGGATATCAAGA |
| | | AGGAGCTGACATCCCTGGGCTTTCTGGAGTCCGGCTCTGACCCCGGACAGC |
| | | TGAAGCACGTGGTGGATGTGACCGACACAGTGCGGAAGGATGTGGAGGAGT |
| | | GGGGCCCTTTCGACCTGGTGTACGGAGCAACCCCTCCACTGGGACACACAT |
| | | GCGACAGACCCCCTTCTTGGTACCTGTTCCAGTTTCACCGCCTGCTGCAGT |
| | | ATGCAAGGCCAAAGCCAGGCAGCCCTAGACCATTCTTTTGGATGTTCGTGG |
| | | ATAATCTGGTGCTGAACAAGGAGGATCTGGACGTGGCCAGCAGGTTTCTGG |
| | | AGATGGAGCCAGTGACCATCCCAGACGTGCACGGCGGCTCCCTGCAGAATG |
| | | CCGTGCGCGTGTGGTCTAACATCCCTGCCATCAGAAGCAGGCACTGGGCAC |
| | | TGGTGAGCGAGGAGGAGCTGTCCCTGCTGGCCCAGAATAAGCAGAGCAGCA |
| | | AGCTGGCCGCCAAGTGGCCTACAAAGCTGGTGAAGAACTGCTTCCTGCCAC |
| | | TGCGGGAGTACTTCAAGTATTTTTCCACCGAGCTGACATCTAGCCTGGGAG |
| | | GACCCTCCTCTGGCGCCCCACCACCTAGCGGCGGCTCCCCTGCCGGCTCTC |
| | | CAACCAGCACAGAGGAGGGCACCAGCGAGTCCGCCACACCAGAGTCTGGAC |
| | | CTGGCACCAGCACAGAGCCATCCGAGGGCTCTGCCCCAGGCTCTCCTGCAG |
| | | GCAGCCCTACCTCCACCGAAGAGGGCACCAGCACAGAGCCTTCTGAGGGCA |
| | | GCGCCCCAGGCACCTCTACAGAGCCAAGCGAGCTCGAGGACAAGAAGTACA |
| | | GCATCGGCCTGGCCATCGGCACCAACTCTGTGGGCTGGGCCGTGATCACCG |
| | | ACGAGTACAAGGTGCCCAGCAAGAAATTCAAGGTGCTGGGCAACACCGACC |
| | | GGCACAGCATCAAGAAGAACCTGATCGGAGCCCTGCTGTTCGACAGCGGCG |
| | | AAACAGCCGAGGCCACCCGGCTGAAGAGAACCGCCAGAAGAAGATACACCA |
| | | GACGGAAGAACCGGATCTGCTATCTGCAAGAGATCTTCAGCAACGAGATGG |
| | | CCAAGGTGGACGACAGCTTCTTCCACAGACTGGAAGAGTCCTTCCTGGTGG |
| | | AAGAGGATAAGAAGCACGAGCGGCACCCCATCTTCGGCAACATCGTGGACG |
| | | AGGTGGCCTACCACGAGAAGTACCCCACCATCTACCACCTGAGAAAGAAAC |
| | | TGGTGGACAGCACCGACAAGGCCGACCTGCGGCTGATCTATCTGGCCCTGG |
| | | CCCACATGATCAAGTTCCGGGGCCACTTCCTGATCGAGGGCGACCTGAACC |
| | | CCGACAACAGCGACGTGGACAAGCTGTTCATCCAGCTGGTGCAGACCTACA |
| | | ACCAGCTGTTCGAGGAAAACCCCATCAACGCCAGCGGCGTGGACGCCAAGG |
| | | CCATCCTGTCTGCCAGACTGAGCAAGAGCAGACGGCTGGAAAATCTGATCG |
| | | CCCAGCTGCCCGGCGAGAAGAAGAATGGCCTGTTCGGCAACCTGATTGCCC |
| | | TGAGCCTGGGCCTGACCCCCAACTTCAAGAGCAACTTCGACCTGGCCGAGG |
| | | ATGCCAAACTGCAGCTGAGCAAGGACACCTACGACGACGACCTGGACAACC |
| | | TGCTGGCCCAGATCGGCGACCAGTACGCCGACCTGTTTCTGGCCGCCAAGA |
| | | ACCTGTCCGACGCCATCCTGCTGAGCGACATCCTGAGAGTGAACACCGAGA |
| | | TCACCAAGGCCCCCCTGAGCGCCTCTATGATCAAGAGATACGACGAGCACC |
| | | ACCAGGACCTGACCCTGCTGAAAGCTCTCGTGCGGCAGCAGCTGCCTGAGA |
| | | AGTACAAAGAGATTTTCTTCGACCAGAGCAAGAACGGCTACGCCGGCTACA |
| | | TTGACGGCGGAGCCAGCCAGGAAGAGTTCTACAAGTTCATCAAGCCCATCC |
| | | TGGAAAAGATGGACGGCACCGAGGAACTGCTCGTGAAGCTGAACAGAGAGG |
| | | ACCTGCTGCGGAAGCAGCGGACCTTCGACAACGGCAGCATCCCCCACCAGA |
| | | TCCACCTGGGAGAGCTGCACGCCATTCTGCGGCGGCAGGAAGATTTTTACC |
| | | CATTCCTGAAGGACAACCGGGAAAAGATCGAGAAGATCCTGACCTTCCGCA |
| | | TCCCCTACTACGTGGGCCCTCTGGCCAGGGGAAACAGCAGATTCGCCTGGA |
| | | TGACCAGAAAGAGCGAGGAAACCATCACCCCCTGGAACTTCGAGGAAGTGG |
| | | TGGACAAGGGCGCTTCCGCCCAGAGCTTCATCGAGCGGATGACCAACTTCG |
| | | ATAAGAACCTGCCCAACGAGAAGGTGCTGCCCAAGCACAGCCTGCTGTACG |
| | | AGTACTTCACCGTGTATAACGAGCTGACCAAAGTGAAATACGTGACCGAGG |
| | | GAATGAGAAAGCCCGCCTTCCTGAGCGGCGAGCAGAAAAAGGCCATCGTGG |
| | | ACCTGCTGTTCAAGACCAACCGGAAAGTGACCGTGAAGCAGCTGAAAGAGG |
| | | ACTACTTCAAGAAAATCGAGTGCTTCGACTCCGTGGAAATCTCCGGCGTGG |
| | | AAGATCGGTTCAACGCCTCCCTGGGCACATACCACGATCTGCTGAAAATTA |
| | | TCAAGGACAAGGACTTCCTGGACAATGAGGAAAACGAGGACATTCTGGAAG |
| | | ATATCGTGCTGACCCTGACACTGTTTGAGGACAGAGAGATGATCGAGGAAC |
| | | GGCTGAAAACCTATGCCCACCTGTTCGACGACAAAGTGATGAAGCAGCTGA |
| | | AGCGGCGGAGATACACCGGCTGGGGCAGGCTGAGCCGGAAGCTGATCAACG |
| | | GCATCCGGGACAAGCAGTCCGGCAAGACAATCCTGGATTTCCTGAAGTCCG |
| | | ACGGCTTCGCCAACAGAAACTTCATGCAGCTGATCCACGACGACAGCCTGA |
| | | CCTTTAAAGAGGACATCCAGAAAGCCCAGGTGTCCGGCCAGGGCGATAGCC |
| | | TGCACGAGCACATTGCCAATCTGGCCGGCAGCCCCGCCATTAAGAAGGGCA |
| | | TCCTGCAGACAGTGAAGGTGGTGGACGAGCTCGTGAAAGTGATGGGCCGGC |
| | | ACAAGCCCGAGAACATCGTGATCGAAATGGCCAGAGAGAACCAGACCACCC |
| | | AGAAGGGACAGAAGAACAGCCGCGAGAGAATGAAGCGGATCGAAGAGGGCA |
| | | TCAAAGAGCTGGGCAGCCAGATCCTGAAAGAACACCCCGTGGAAAACACCC |
| | | AGCTGCAGAACGAGAAGCTGTACCTGTACTACCTGCAGAATGGGCGGGATA |
| | | TGTACGTGGACCAGGAACTGGACATCAACCGGCTGTCCGACTACGATGTGG |
| | | ACGCCATCGTGCCTCAGAGCTTTCTGAAGGACGACTCCATCGACAACAAGG |
| | | TGCTGACCAGAAGCGACAAGAACCGGGGCAAGAGCGACAACGTGCCCTCCG |
| | | AAGAGGTCGTGAAGAAGATGAAGAACTACTGGCGGCAGCTGCTGAACGCCA |
| | | AGCTGATTACCCAGAGAAAGTTCGACAATCTGACCAAGGCCGAGAGAGGCG |
| | | GCCTGAGCGAACTGGATAAGGCCGGCTTCATCAAGAGACAGCTGGTGGAAA |
| | | CCCGGCAGATCACAAAGCACGTGGCACAGATCCTGGACTCCCGGATGAACA |
| | | CTAAGTACGACGAGAATGACAAGCTGATCCGGGAAGTGAAAGTGATCACCC |
| | | TGAAGTCCAAGCTGGTGTCCGATTTCCGGAAGGATTTCCAGTTTTACAAAG |
| | | TGCGCGAGATCAACAACTACCACCACGCCCACGACGCCTACCTGAACGCCG |
| | | TCGTGGGAACCGCCCTGATCAAAAAGTACCCTAAGCTGGAAAGCGAGTTCG |
| | | TGTACGGCGACTACAAGGTGTACGACGTGCGGAAGATGATCGCCAAGAGCG |
| | | AGCAGGAAATCGGCAAGGCTACCGCCAAGTACTTCTTCTACAGCAACATCA |
| | | TGAACTTTTTCAAGACCGAGATTACCCTGGCCAACGGCGAGATCCGGAAGC |
| | | GGCCTCTGATCGAGACAAACGGCGAAACCGGGGAGATCGTGTGGGATAAGG |
| | | GCCGGGATTTTGCCACCGTGCGGAAAGTGCTGAGCATGCCCCAAGTGAATA |
| | | TCGTGAAAAAGACCGAGGTGCAGACAGGCGGCTTCAGCAAAGAGTCTATCC |
| | | TGCCCAAGAGGAACAGCGATAAGCTGATCGCCAGAAAGAAGGACTGGGACC |
| | | CTAAGAAGTACGGCGGCTTCGACAGCCCCACCGTGGCCTATTCTGTGCTGG |
| | | TGGTGGCCAAAGTGGAAAAGGGCAAGTCCAAGAAACTGAAGAGTGTGAAAG |
| | | AGCTGCTGGGGATCACCATCATGGAAAGAAGCAGCTTCGAGAAGAATCCCA |
| | | TCGACTTTCTGGAAGCCAAGGGCTACAAAGAAGTGAAAAAGGACCTGATCA |
| | | TCAAGCTGCCTAAGTACTCCCTGTTCGAGCTGGAAAACGGCCGGAAGAGAA |
| | | TGCTGGCCTCTGCCGGCGAACTGCAGAAGGGAAACGAACTGGCCCTGCCCT |
| | | CCAAATATGTGAACTTCCTGTACCTGGCCAGCCACTATGAGAAGCTGAAGG |
| | | GCTCCCCCGAGGATAATGAGCAGAAACAGCTGTTTGTGGAACAGCACAAGC |
| | | ACTACCTGGACGAGATCATCGAGCAGATCAGCGAGTTCTCCAAGAGAGTGA |
| | | TCCTGGCCGACGCTAATCTGGACAAAGTGCTGTCCGCCTACAACAAGCACC |
| | | GGGATAAGCCCATCAGAGAGCAGGCCGAGAATATCATCCACCTGTTTACCC |
| | | TGACCAATCTGGGAGCCCCTGCCGCCTTCAAGTACTTTGACACCACCATCG |
| | | ACCGGAAGAGGTACACCAGCACCAAAGAGGTGCTGGACGCCACCCTGATCC |
| | | ACCAGAGCATCACCGGCCTGTACGAGACACGGATCGACCTGTCTCAGCTGG |
| | | GAGGCGACAGCCCCAAGAAGAAGAGAAAGGTGGGAGTCGACGGATCCAGCG |
| | | GCTCCGAGACCCCAGGCACATCTGAGAGCGCCACCCCTGAGTCCACCGGTA |
| | | TGAACAATTCACAGGGGAGAGTGACATTCGAAGACGTGACCGTGAACTTCA |
| | | CCCAGGGAGAATGGCAGCGCTTGAACCCAGAACAAAGGAACCTCTATCGGG |
| | | ACGTGATGCTGGAAAACTACTCAAATTTGGTGAGCGTTGGGCAGGGTGAGA |
| | | CCACTAAGCCTGACGTGATCCTGAGATTGGAACAGGGCAAGGAGCCTTGGC |
| | | TCGAGGAAGAGGAAGTCCTGGGCTCAGGGAGGGCCGAGAAAAACGGTGATA |
| | | TAGGAGGCCAGATATGGAAGCCTAAGGACGTCAAGGAGAGCCTGAGCGCTC |
| | | CCAAGAAGAAAAGGAAGGTCCCAAAGAAAAAAAGAAAGGTGTGAGGATCCT |
| | | GAGTCTAGAAATCAACCTCTGGATTACAAAATTTGTGAAAGATTGACTGGT |
| | | ATTCTTAACTATGTTGCTCCTTTTACGCTATGTGGATACGCTGCTTTAATG |
| | | CCTTTGTATCATGCTATTGCTTCCCGTATGGCTTTCATTTTCTCCTCCTTG |
| | | TATAAATCCTGGTTGCTGTCTCTTTATGAGGAGTTGTGGCCCGTTGTCAGG |
| | | CAACGTGGCGTGGTGTGCACTGTGTTTGCTGACGCAACCCCCACTGGTTGG |
| | | GGCATTGCCACCACCTGTCAGCTCCTTTCCGGGACTTTCGCTTTCCCCCTC |
| | | CCTATTGCCACGGCGGAACTCATCGCCGCCTGCCTTGCCCGCTGCTGGACA |
| | | GGGGCTCGGCTGTTGGGCACTGACAATTCCGTGGTGTTGTCGGGGAAATCA |
| | | TCGTCCTTTCCTTGGCTGCTCGCCTGTGTTGCCACCTGGATTCTGCGCGGG |
| | | ACGTCCTTCTGCTACGTCCCTTCGGCCCTCAATCCAGCGGACCTTCCTTCC |
| | | CGCGGCCTGCTGCCGGCTCTGCGGCCTCTTCCGCGTCTTCGCCTTCGCCCT |
| | | CAGACGAGTCGGATCTCCCTTTGGGCCGCCTCCCCGCCTGTTAATTAAAAA |
| | | AAAAAAAAAAAAAAAAAAAAAAAAAAAAAAAAAAAAAAAAAAAAAAAAAAA |
| | | AAAAAAAAAAAAAAAAAAAAAAAAAAAAAAAAAAAAAAAAAAAAAGCTTGA |
| | | AGAGCCTAGTGGCGCCTGATGCGGTATTTTCTCCTTACGCATCTGTGCGGT |
| | | ATTTCACACCGCATAATCCAGCACAGTGGCGGCCCGTTTAAACCCGCTGAT |
| | | CAGCCTCGACTGTGCCTTCTAGTTGCCAGCCATCTGTTGTTTGCCCCTCCC |
| | | CCGTGCCTTCCTTGACCCTGGAAGGTGCCACTCCCACTGTCCTTTCCTAAT |
| | | AAAATGAGGAAATTGCATCGCATTGTCTGAGTAGGTGTCATTCTATTCTGG |
| | | GGGGTGGGGTGGGGCAGGACAGCAAGGGGGAGGATTGGGAAGACAATAGCA |
| | | GGCATGCTGGGGATGCGGTGGGCTCTATGGCTTCTGAGGCGGAAAGAACCA |
| | | GCTGCATTAATGAATCGGCCAACGCGCGGGGAGAGGCGGTTTGCGTATTGG |
| | | GCGCTCTTCCGCTTCCTCGCTCACTGACTCGCTGCGCTCGGTCGTTCGGCT |
| | | GCGGCGAGCGGTATCAGCTCACTCAAAGGCGGTAATACGGTTATCCACAGA |
| | | ATCAGGGGATAACGCAGGAAAGAACATGTGAGCAAAAGGCCAGCAAAAGGC |
| | | CAGGAACCGTAAAAAGGCCGCGTTGCTGGCGTTTTTCCATAGGCTCCGCCC |
| | | CCCTGACGAGCATCACAAAAATCGACGCTCAAGTCAGAGGTGGCGAAACCC |
| | | GACAGGACTATAAAGATACCAGGCGTTTCCCCCTGGAAGCTCCCTCGTGCG |
| | | CTCTCCTGTTCCGACCCTGCCGCTTACCGGATACCTGTCCGCCTTTCTCCC |
| | | TTCGGGAAGCGTGGCGCTTTCTCATAGCTCACGCTGTAGGTATCTCAGTTC |
| | | GGTGTAGGTCGTTCGCTCCAAGCTGGGCTGTGTGCACGAACCCCCCGTTCA |
| | | GCCCGACCGCTGCGCCTTATCCGGTAACTATCGTCTTGAGTCCAACCCGGT |
| | | AAGACACGACTTATCGCCACTGGCAGCAGCCACTGGTAACAGGATTAGCAG |
| | | AGCGAGGTATGTAGGCGGTGCTACAGAGTTCTTGAAGTGGTGGCCTAACTA |
| | | CGGCTACACTAGAAGAACAGTATTTGGTATCTGCGCTCTGCTGAAGCCAGT |
| | | TACCTTCGGAAAAAGAGTTGGTAGCTCTTGATCCGGCAAACAAACCACCGC |
| | | TGGTAGCGGTGGTTTTTTTGTTTGCAAGCAGCAGATTACGCGCAGAAAAAA |
| | | AGGATCTCAAGAAGATCCTTTGATCTTTTCTACGGGGTCTGACGCTCAGTG |
| | | GAACGAAAACTCACGTTAAGGGATTTTGGTCATGAGATTATCAAAAAGGAT |
| | | CTTCACCTAGATCCTTTTAAATTAAAAATGAAGTTTTAAATCAATCTAAAG |
| | | TATATATGAGTAAACTTGGTCTGACAGTTAGAAAAACTCATCGAGCATCAA |
| | | ATGAAACTGCAATTTATTCATATCAGGATTATCAATACCATATTTTTGAAA |
| | | AAGCCGTTTCTGTAATGAAGGAGAAAACTCACCGAGGCAGTTCCATAGGAT |
| | | GGCAAGATCCTGGTATCGGTCTGCGATTCCGACTCGTCCAACATCAATACA |
| | | ACCTATTAATTTCCCCTCGTCAAAAATAAGGTTATCAAGTGAGAAATCACC |
| | | ATGAGTGACGACTGAATCCGGTGAGAATGGCAAAAGTTTATGCATTTCTTT |
| | | CCAGACTTGTTCAACAGGCCAGCCATTACGCTCGTCATCAAAATCACTCGC |
| | | ATCAACCAAACCGTTATTCATTCGTGATTGCGCCTGAGCGAAACGAAATAC |
| | | GCGATCGCTGTTAAAAGGACAATTACAAACAGGAATCGAATGCAACCGGCG |
| | | CAGGAACACTGCCAGCGCATCAACAATATTTTCACCTGAATCAGGATATTC |
| | | TTCTAATACCTGGAATGCTGTTTTCCCAGGGATCGCAGTGGTGAGTAACCA |
| | | TGCATCATCAGGAGTACGGATAAAATGCTTGATGGTCGGAAGAGGCATAAA |
| | | TTCCGTCAGCCAGTTTAGTCTGACCATCTCATCTGTAACATCATTGGCAAC |
| | | GCTACCTTTGCCATGTTTCAGAAACAACTCTGGCGCATCGGGCTTCCCATA |
| | | CAATCGATAGATTGTCGCACCTGATTGCCCGACATTATCGCGAGCCCATTT |
| | | ATACCCATATAAATCAGCATCCATGTTGGAATTTAATCGCGGCCTAGAGCA |
| | | AGACGTTTCCCGTTGAATATGGCTCATACTCTTCCTTTTTCAATATTATTG |
| | | AAGCATTTATCAGGGTTATTGTCTCATGAGCGGATACATATTTGAATGTAT |
| | | TTAGAAAAATAAACAAATAGGGGTTCCGCGCACATTTCCCCGAAAAGTGCC |
| | | ACCTGACGTCGATCGACGGATCGGGAGATCTCCCGATCCCCTATGGTGCAC |
| | | TCTCAGTACAATCTGCTCTGATGCCGCATAGTTAAGCCAGTATCTGCTCCC |
| | | TGCTTGTGTGTTGGAGGTCGCTGAGTAGTGCGCGAGCAAAATTTAAGCTAC |
| | | AACAAGGCAAGGCTTGACCGACAATTGCATGAAGAATCTGCTTAGGGTTAG |
| | | GCGTTTTGCGCTGCTTCGCGATGTACGGGCCAGATATACGCGTTGACATTG |
| | | ATTATTGACTAGTTATTAATAGTAATCAATTACGGGGTCATTAGTTCATAG |
| | | CCCATATATGGAGTTCCGCGTTACATAACTTACGGTAAATGGCCCGCCTGG |
| | | CTGACCGCCCAACGACCCCCGCCCATTGACGTCAATAATGACGTATGTTCC |
| | | CATAGTAACGCCAATAGGGACTTTCCATTGACGTCAATGGGTGGAGTATTT |
| | | ACGGTAAACTGCCCACTTGGCAGTACATCAAGTGTATCATATGCCAAGTAC |
| | | GCCCCCTATTGACGTCAATGACGGTAAATGGCCCGCCTGGCATTATGCCCA |
| | | GTACATGACCTTATGGGACTTTCCTACTTGGCAGTACATCTACGTATTAGT |
| | | CATCGCTATTACCATGGTGATGCGGTTTTGGCAGTACATCAATGGGCGTGG |
| | | ATAGCGGTTTGACTCACGGGGATTTCCAAGTCTCCACCCCATTGACGTCAA |
| | | TGGGAGTTTGTTTTGGCACCAAAATCAACGGGACTTTCCAAAATGTCGTAA |
| | | CAACTCCGCCCCATTGACGCAAATGGGCGGTAGGCGTGTACGGTGGGAGGT |
| | | CTATATAAGCAGAGCTCTCTGGCTAACTAGAGAACCCACTGCTTACTGGCT |
| | | TATCGAAATTAATACGACTCACTATAAG |
| 494 | PLA003 | ATGCCAAAAAAGAAGAGAAAGGTACCGAAGAAAAAAAGAAAGGTATACAAT |
| | plasmid | CACGATCAGGAGTTCGACCCCCCTAAGGTGTACCCACCAGTGCCTGCAGAG |
| | coding | AAGAGGAAGCCAATCCGGGTGCTGAGCCTGTTTGATGGCATCGCCACCGGC |
| | sequence | CTGCTGGTGCTGAAGGATCTGGGCATCCAGGTGGACCGGTACATCGCCTCC |
| | | GAGGTGTGCGAGGATTCTATCACCGTGGGCATGGTGCGCCACCAGGGCAAG |
| | | ATCATGTATGTGGGCGACGTGCGGTCCGTGACACAGAAGCACATCCAGGAG |
| | | TGGGGCCCATTCGATCTGGTGATCGGCGGCAGCCCCTGTAATGACCTGTCC |
| | | ATCGTGAACCCTGCAAGGAAGGGACTGTACGAGGGAACCGGCCGGCTGTTC |
| | | TTTGAGTTTTATAGACTGCTGCACGACGCCAGGCCTAAGGAGGGCGACGAT |
| | | AGACCATTCTTTTGGCTGTTCGAGAATGTGGTGGCTATGGGCGTGAGCGAT |
| | | AAGAGGGACATCTCCAGGTTTCTGGAGTCTAACCCCGTGATGATCGATGCA |
| | | AAGGAGGTGTCCGCCGCACACAGAGCCAGGTATTTCTGGGGCAATCTGCCA |
| | | GGAATGAACAGGCCACTGGCAAGCACCGTGAATGACAAGCTGGAGCTGCAG |
| | | GAGTGCCTGGAGCACGGAAGGATCGCCAAGTTTTCCAAGGTGCGCACAATC |
| | | ACCACACGGAGCAATTCCATCAAGCAGGGCAAGGATCAGCACTTCCCCGTG |
| | | TTCATGAACGAGAAGGAGGACATCCTGTGGTGTACCGAGATGGAGAGAGTG |
| | | TTCGGCTTTCCAGTGCACTACACAGACGTGTCTAACATGAGCAGGCTGGCA |
| | | AGGCAGCGGCTGCTGGGCAGATCTTGGAGCGTGCCCGTGATCAGGCACCTG |
| | | TTCGCCCCTCTGAAGGAGTATTTTGCCTGCGTGAGCAGCGGCAACTCCAAT |
| | | GCCAACAGCCGGGGCCCCTCTTTCAGCTCCGGATTGGTGCCTCTGAGCCTG |
| | | AGGGGCTCCCACATGGCAGCAATCCCCGCCCTGGACCCCGAGGCCGAGCCT |
| | | AGCATGGACGTGATCCTGGTGGGCTCTAGCGAGCTGTCCTCTAGCGTGTCT |
| | | CCAGGAACCGGAAGGGATCTGATCGCATACGAGGTGAAGGCCAATCAGCGG |
| | | AACATCGAGGACATCTGTATCTGCTGTGGCAGCCTGCAGGTGCACACACAG |
| | | CACCCACTGTTCGAGGGAGGAATCTGCGCACCCTGTAAGGATAAGTTCCTG |
| | | GACGCCCTGTTTCTGTACGACGATGACGGCTACCAGTCCTATTGCTCTATC |
| | | TGCTGTTCCGGCGAGACCCTGCTGATCTGCGGCAATCCAGATTGTACAAGG |
| | | TGCTATTGTTTTGAGTGCGTGGACTCTCTGGTGGGACCAGGCACCAGCGGA |
| | | AAGGTGCACGCCATGTCCAACTGGGTGTGCTACCTGTGCCTGCCATCCTCT |
| | | CGCAGCGGACTGCTGCAGCGGAGAAGGAAGTGGAGATCCCAGCTGAAGGCC |
| | | TTCTATGATAGGGAGTCTGAGAACCCCCTGGAGATGTTTGAGACCGTGCCA |
| | | GTGTGGCGCCGGCAGCCCGTGAGGGTGCTGAGCCTGTTCGAGGATATCAAG |
| | | AAGGAGCTGACATCCCTGGGCTTTCTGGAGTCCGGCTCTGACCCCGGACAG |
| | | CTGAAGCACGTGGTGGATGTGACCGACACAGTGCGGAAGGATGTGGAGGAG |
| | | TGGGGCCCTTTCGACCTGGTGTACGGAGCAACCCCTCCACTGGGACACACA |
| | | TGCGACAGACCCCCTTCTTGGTACCTGTTCCAGTTTCACCGCCTGCTGCAG |
| | | TATGCAAGGCCAAAGCCAGGCAGCCCTAGACCATTCTTTTGGATGTTCGTG |
| | | GATAATCTGGTGCTGAACAAGGAGGATCTGGACGTGGCCAGCAGGTTTCTG |
| | | GAGATGGAGCCAGTGACCATCCCAGACGTGCACGGCGGCTCCCTGCAGAAT |
| | | GCCGTGCGCGTGTGGTCTAACATCCCTGCCATCAGAAGCAGGCACTGGGCA |
| | | CTGGTGAGCGAGGAGGAGCTGTCCCTGCTGGCCCAGAATAAGCAGAGCAGC |
| | | AAGCTGGCCGCCAAGTGGCCTACAAAGCTGGTGAAGAACTGCTTCCTGCCA |
| | | CTGCGGGAGTACTTCAAGTATTTTTCCACCGAGCTGACATCTAGCCTGGGA |
| | | GGACCCTCCTCTGGCGCCCCACCACCTAGCGGCGGCTCCCCTGCCGGCTCT |
| | | CCAACCAGCACAGAGGAGGGCACCAGCGAGTCCGCCACACCAGAGTCTGGA |
| | | CCTGGCACCAGCACAGAGCCATCCGAGGGCTCTGCCCCAGGCTCTCCTGCA |
| | | GGCAGCCCTACCTCCACCGAAGAGGGCACCAGCACAGAGCCTTCTGAGGGC |
| | | AGCGCCCCAGGCACCTCTACAGAGCCAAGCGAGCTCGAGGACAAGAAGTAC |
| | | AGCATCGGCCTGGCCATCGGCACCAACTCTGTGGGCTGGGCCGTGATCACC |
| | | GACGAGTACAAGGTGCCCAGCAAGAAATTCAAGGTGCTGGGCAACACCGAC |
| | | CGGCACAGCATCAAGAAGAACCTGATCGGAGCCCTGCTGTTCGACAGCGGC |
| | | GAAACAGCCGAGGCCACCCGGCTGAAGAGAACCGCCAGAAGAAGATACACC |
| | | AGACGGAAGAACCGGATCTGCTATCTGCAAGAGATCTTCAGCAACGAGATG |
| | | GCCAAGGTGGACGACAGCTTCTTCCACAGACTGGAAGAGTCCTTCCTGGTG |
| | | GAAGAGGATAAGAAGCACGAGCGGCACCCCATCTTCGGCAACATCGTGGAC |
| | | GAGGTGGCCTACCACGAGAAGTACCCCACCATCTACCACCTGAGAAAGAAA |
| | | CTGGTGGACAGCACCGACAAGGCCGACCTGCGGCTGATCTATCTGGCCCTG |
| | | GCCCACATGATCAAGTTCCGGGGCCACTTCCTGATCGAGGGCGACCTGAAC |
| | | CCCGACAACAGCGACGTGGACAAGCTGTTCATCCAGCTGGTGCAGACCTAC |
| | | AACCAGCTGTTCGAGGAAAACCCCATCAACGCCAGCGGCGTGGACGCCAAG |
| | | GCCATCCTGTCTGCCAGACTGAGCAAGAGCAGACGGCTGGAAAATCTGATC |
| | | GCCCAGCTGCCCGGCGAGAAGAAGAATGGCCTGTTCGGCAACCTGATTGCC |
| | | CTGAGCCTGGGCCTGACCCCCAACTTCAAGAGCAACTTCGACCTGGCCGAG |
| | | GATGCCAAACTGCAGCTGAGCAAGGACACCTACGACGACGACCTGGACAAC |
| | | CTGCTGGCCCAGATCGGCGACCAGTACGCCGACCTGTTTCTGGCCGCCAAG |
| | | AACCTGTCCGACGCCATCCTGCTGAGCGACATCCTGAGAGTGAACACCGAG |
| | | ATCACCAAGGCCCCCCTGAGCGCCTCTATGATCAAGAGATACGACGAGCAC |
| | | CACCAGGACCTGACCCTGCTGAAAGCTCTCGTGCGGCAGCAGCTGCCTGAG |
| | | AAGTACAAAGAGATTTTCTTCGACCAGAGCAAGAACGGCTACGCCGGCTAC |
| | | ATTGACGGCGGAGCCAGCCAGGAAGAGTTCTACAAGTTCATCAAGCCCATC |
| | | CTGGAAAAGATGGACGGCACCGAGGAACTGCTCGTGAAGCTGAACAGAGAG |
| | | GACCTGCTGCGGAAGCAGCGGACCTTCGACAACGGCAGCATCCCCCACCAG |
| | | ATCCACCTGGGAGAGCTGCACGCCATTCTGCGGCGGCAGGAAGATTTTTAC |
| | | CCATTCCTGAAGGACAACCGGGAAAAGATCGAGAAGATCCTGACCTTCCGC |
| | | ATCCCCTACTACGTGGGCCCTCTGGCCAGGGGAAACAGCAGATTCGCCTGG |
| | | ATGACCAGAAAGAGCGAGGAAACCATCACCCCCTGGAACTTCGAGGAAGTG |
| | | GTGGACAAGGGCGCTTCCGCCCAGAGCTTCATCGAGCGGATGACCAACTTC |
| | | GATAAGAACCTGCCCAACGAGAAGGTGCTGCCCAAGCACAGCCTGCTGTAC |
| | | GAGTACTTCACCGTGTATAACGAGCTGACCAAAGTGAAATACGTGACCGAG |
| | | GGAATGAGAAAGCCCGCCTTCCTGAGCGGCGAGCAGAAAAAGGCCATCGTG |
| | | GACCTGCTGTTCAAGACCAACCGGAAAGTGACCGTGAAGCAGCTGAAAGAG |
| | | GACTACTTCAAGAAAATCGAGTGCTTCGACTCCGTGGAAATCTCCGGCGTG |
| | | GAAGATCGGTTCAACGCCTCCCTGGGCACATACCACGATCTGCTGAAAATT |
| | | ATCAAGGACAAGGACTTCCTGGACAATGAGGAAAACGAGGACATTCTGGAA |
| | | GATATCGTGCTGACCCTGACACTGTTTGAGGACAGAGAGATGATCGAGGAA |
| | | CGGCTGAAAACCTATGCCCACCTGTTCGACGACAAAGTGATGAAGCAGCTG |
| | | AAGCGGCGGAGATACACCGGCTGGGGCAGGCTGAGCCGGAAGCTGATCAAC |
| | | GGCATCCGGGACAAGCAGTCCGGCAAGACAATCCTGGATTTCCTGAAGTCC |
| | | GACGGCTTCGCCAACAGAAACTTCATGCAGCTGATCCACGACGACAGCCTG |
| | | ACCTTTAAAGAGGACATCCAGAAAGCCCAGGTGTCCGGCCAGGGCGATAGC |
| | | CTGCACGAGCACATTGCCAATCTGGCCGGCAGCCCCGCCATTAAGAAGGGC |
| | | ATCCTGCAGACAGTGAAGGTGGTGGACGAGCTCGTGAAAGTGATGGGCCGG |
| | | CACAAGCCCGAGAACATCGTGATCGAAATGGCCAGAGAGAACCAGACCACC |
| | | CAGAAGGGACAGAAGAACAGCCGCGAGAGAATGAAGCGGATCGAAGAGGGC |
| | | ATCAAAGAGCTGGGCAGCCAGATCCTGAAAGAACACCCCGTGGAAAACACC |
| | | CAGCTGCAGAACGAGAAGCTGTACCTGTACTACCTGCAGAATGGGCGGGAT |
| | | ATGTACGTGGACCAGGAACTGGACATCAACCGGCTGTCCGACTACGATGTG |
| | | GACGCCATCGTGCCTCAGAGCTTTCTGAAGGACGACTCCATCGACAACAAG |
| | | GTGCTGACCAGAAGCGACAAGAACCGGGGCAAGAGCGACAACGTGCCCTCC |
| | | GAAGAGGTCGTGAAGAAGATGAAGAACTACTGGCGGCAGCTGCTGAACGCC |
| | | AAGCTGATTACCCAGAGAAAGTTCGACAATCTGACCAAGGCCGAGAGAGGC |
| | | GGCCTGAGCGAACTGGATAAGGCCGGCTTCATCAAGAGACAGCTGGTGGAA |
| | | ACCCGGCAGATCACAAAGCACGTGGCACAGATCCTGGACTCCCGGATGAAC |
| | | ACTAAGTACGACGAGAATGACAAGCTGATCCGGGAAGTGAAAGTGATCACC |
| | | CTGAAGTCCAAGCTGGTGTCCGATTTCCGGAAGGATTTCCAGTTTTACAAA |
| | | GTGCGCGAGATCAACAACTACCACCACGCCCACGACGCCTACCTGAACGCC |
| | | GTCGTGGGAACCGCCCTGATCAAAAAGTACCCTAAGCTGGAAAGCGAGTTC |
| | | GTGTACGGCGACTACAAGGTGTACGACGTGCGGAAGATGATCGCCAAGAGC |
| | | GAGCAGGAAATCGGCAAGGCTACCGCCAAGTACTTCTTCTACAGCAACATC |
| | | ATGAACTTTTTCAAGACCGAGATTACCCTGGCCAACGGCGAGATCCGGAAG |
| | | CGGCCTCTGATCGAGACAAACGGCGAAACCGGGGAGATCGTGTGGGATAAG |
| | | GGCCGGGATTTTGCCACCGTGCGGAAAGTGCTGAGCATGCCCCAAGTGAAT |
| | | ATCGTGAAAAAGACCGAGGTGCAGACAGGCGGCTTCAGCAAAGAGTCTATC |
| | | CTGCCCAAGAGGAACAGCGATAAGCTGATCGCCAGAAAGAAGGACTGGGAC |
| | | CCTAAGAAGTACGGCGGCTTCGACAGCCCCACCGTGGCCTATTCTGTGCTG |
| | | GTGGTGGCCAAAGTGGAAAAGGGCAAGTCCAAGAAACTGAAGAGTGTGAAA |
| | | GAGCTGCTGGGGATCACCATCATGGAAAGAAGCAGCTTCGAGAAGAATCCC |
| | | ATCGACTTTCTGGAAGCCAAGGGCTACAAAGAAGTGAAAAAGGACCTGATC |
| | | ATCAAGCTGCCTAAGTACTCCCTGTTCGAGCTGGAAAACGGCCGGAAGAGA |
| | | ATGCTGGCCTCTGCCGGCGAACTGCAGAAGGGAAACGAACTGGCCCTGCCC |
| | | TCCAAATATGTGAACTTCCTGTACCTGGCCAGCCACTATGAGAAGCTGAAG |
| | | GGCTCCCCCGAGGATAATGAGCAGAAACAGCTGTTTGTGGAACAGCACAAG |
| | | CACTACCTGGACGAGATCATCGAGCAGATCAGCGAGTTCTCCAAGAGAGTG |
| | | ATCCTGGCCGACGCTAATCTGGACAAAGTGCTGTCCGCCTACAACAAGCAC |
| | | CGGGATAAGCCCATCAGAGAGCAGGCCGAGAATATCATCCACCTGTTTACC |
| | | CTGACCAATCTGGGAGCCCCTGCCGCCTTCAAGTACTTTGACACCACCATC |
| | | GACCGGAAGAGGTACACCAGCACCAAAGAGGTGCTGGACGCCACCCTGATC |
| | | CACCAGAGCATCACCGGCCTGTACGAGACACGGATCGACCTGTCTCAGCTG |
| | | GGAGGCGACAGCCCCAAGAAGAAGAGAAAGGTGGGAGTCGACGGATCCAGC |
| | | GGCTCCGAGACCCCAGGCACATCTGAGAGCGCCACCCCTGAGTCCACCGGT |
| | | ATGAACAATTCACAGGGGAGAGTGACATTCGAAGACGTGACCGTGAACTTC |
| | | ACCCAGGGAGAATGGCAGCGCTTGAACCCAGAACAAAGGAACCTCTATCGG |
| | | GACGTGATGCTGGAAAACTACTCAAATTTGGTGAGCGTTGGGCAGGGTGAG |
| | | ACCACTAAGCCTGACGTGATCCTGAGATTGGAACAGGGCAAGGAGCCTTGG |
| | | CTCGAGGAAGAGGAAGTCCTGGGCTCAGGGAGGGCCGAGAAAAACGGTGAT |
| | | ATAGGAGGCCAGATATGGAAGCCTAAGGACGTCAAGGAGAGCCTGAGCGCT |
| | | CCCAAGAAGAAAAGGAAGGTCCCAAAGAAAAAAAGAAAGGTGTGA |

[0261] Table 8 below lists components of the fusion polypeptide PLA001 and their corresponding amino acid position in the fusion polypeptide sequence (SEQ ID No. 481) set forth in Table 7.

TABLE 8
annotation of PLA001 amino acid sequence

| | Type | Start | End | Length |
|---|---|---|---|---|
| SV40 NLS | CDS | 2 | 8 | 7 |
| SV40 NLS | CDS | 9 | 15 | 7 |
| DNMT3A | CDS | 17 | 317 | 301 |
| Linker | CDS | 318 | 344 | 27 |
| DNMT3L full- | CDS | 345 | 730 | 386 |
| length | | | | |
| XTEN80 | CDS | 731 | 810 | 80 |
| dCas9 | CDS | 811 | 2180 | 1370 |
| NLS | CDS | 2181 | 2187 | 7 |
| XTEN16 | CDS | 2188 | 2208 | 21 |
| ZN627 | CDS | 2211 | 2290 | 80 |
| FLAG | CDS | 2293 | 2300 | 8 |
| SV40 NLS | CDS | 2302 | 2308 | 7 |
| SV40 NLS | CDS | 2309 | 2315 | 7 |

[0262] Table 9 below lists components of the polynucleotide encoding the fusion polypeptide PLA001 and their corresponding nucleotide position in the polynucleotide sequence (SEQ ID No. 482) set forth in Table 7.

TABLE 9
annotation of PLA001 polynucleotide sequence

| Name | Type | Minimum | Maximum | Length |
|---|---|---|---|---|
| SV40 NLS | CDS | 4 | 24 | 21 |
| SV40 NLS | CDS | 25 | 44 | 20 |
| DNMT3A | CDS | 49 | 951 | 903 |
| Linker | CDS | 952 | 1032 | 81 |
| DNMT3L full- | CDS | 1033 | 2190 | 1158 |
| length | | | | |
| XTEN80 | CDS | 2191 | 2430 | 240 |
| dCas9 | CDS | 2431 | 6540 | 4110 |
| NLS | CDS | 6541 | 6561 | 21 |
| XTEN16 | CDS | 6562 | 6624 | 63 |
| ZN627 | CDS | 6631 | 6870 | 240 |
| FLAG | CDS | 6877 | 6900 | 24 |
| SV40 NLS | CDS | 6904 | 6924 | 21 |
| SV40 NLS | CDS | 6925 | 6945 | 21 |

[0263] Table 10 below lists components of the fusion polypeptide PLA002 and their corresponding amino acid position in the fusion polypeptide sequence (SEQ ID No. 483) set forth in Table 7.

TABLE 10
annotation of PLA002 amino acid sequence

| Name | Type | Minimum | Maximum | Length |
|---|---|---|---|---|
| SV40 NLS | CDS | 2 | 8 | 7 |
| SV40 NLS | CDS | 9 | 15 | 7 |
| DNMT3A | CDS | 17 | 317 | 301 |
| Linker | CDS | 318 | 344 | 27 |
| DNMT3L full- | CDS | 345 | 730 | 386 |
| length | | | | |
| XTEN80 | CDS | 731 | 810 | 80 |
| dCas9 | CDS | 811 | 2180 | 1370 |
| NLS | CDS | 2181 | 2187 | 7 |
| XTEN16 | CDS | 2188 | 2208 | 21 |
| ZIM3 | CDS | 2211 | 2310 | 100 |
| FLAG | CDS | 2313 | 2320 | 8 |
| SV40 NLS | CDS | 2322 | 2328 | 7 |
| SV40 NLS | CDS | 2329 | 2335 | 7 |

[0264] Table 11 below lists components of the polynucleotide encoding the fusion polypeptide PLA002 and their corresponding nucleotide position in the polynucleotide sequence (SEQ ID No. 484) set forth in Table 7.

TABLE 11
annotation of PLA002 polynucleotide sequence

| Name | Type | Minimum | Maximum | Length |
|---|---|---|---|---|
| SV40 NLS | CDS | 4 | 24 | 21 |
| SV40 NLS | CDS | 25 | 45 | 21 |
| DNMT3A | CDS | 49 | 951 | 903 |
| Linker | CDS | 952 | 1032 | 81 |
| DNMT3L full- | CDS | 1033 | 2190 | 1158 |
| length | | | | |
| XTEN80 | CDS | 2191 | 2430 | 240 |
| dCas9 | CDS | 2431 | 6540 | 4110 |
| NLS | CDS | 6541 | 6561 | 21 |
| XTEN16 | CDS | 6562 | 6624 | 63 |
| ZIM3 | CDS | 6631 | 6930 | 300 |
| FLAG | CDS | 6937 | 6960 | 24 |
| SV40 NLS | CDS | 6964 | 6984 | 21 |
| SV40 NLS | CDS | 6985 | 7005 | 21 |
| stop | terminator | 7006 | 7008 | 3 |

TABLE 12
Annotation of PLA003 amino acid sequence

| Name | Type | Minimum | Maximum | Length |
|---|---|---|---|---|
| SV40 NLS | CDS | 2 | 8 | 7 |
| SV40 NLS | CDS | 9 | 15 | 7 |
| DNMT3A | CDS | 17 | 317 | 301 |
| Linker | CDS | 318 | 344 | 27 |
| DNMT3L full- | CDS | 345 | 730 | 386 |
| length | | | | |
| XTEN80 | CDS | 731 | 810 | 80 |
| dCas9 | CDS | 811 | 2180 | 1370 |
| NLS | CDS | 2181 | 2187 | 7 |
| XTEN16 | CDS | 2188 | 2208 | 21 |
| ZIM3 | CDS | 2211 | 2310 | 100 |
| SV40 NLS | CDS | 2313 | 2319 | 7 |
| SV40 NLS | CDS | 2320 | 2326 | 7 |

TABLE 13
Annotation of PLA003 polynucleotide sequence

| Name | Type | Minimum | Maximum | Length |
|---|---|---|---|---|
| SV40 NLS | CDS | 4 | 24 | 21 |
| SV40 NLS | CDS | 25 | 45 | 21 |
| DNMT3A | CDS | 49 | 951 | 903 |
| Linker | CDS | 952 | 1032 | 81 |
| DNMT3L full- | CDS | 1033 | 2190 | 1158 |
| length | | | | |
| XTEN80 | CDS | 2191 | 2430 | 240 |
| dCas9 | CDS | 2431 | 6540 | 4110 |
| NLS | CDS | 6541 | 6561 | 21 |
| XTEN16 | CDS | 6562 | 6624 | 63 |
| ZIM3 | CDS | 6631 | 6930 | 300 |
| SV40 NLS | CDS | 6937 | 6957 | 21 |
| SV40 NLS | CDS | 6958 | 6978 | 21 |
| stop | terminator | 6979 | 6981 | 3 |

[0265] Table 14 below provides gRNA sequence tested.

TABLE 14
Exemplary gRNA sequences

| | Target | | |
|---|---|---|---|
| SEQ | domain | SEQ | |
| IDs | sequence | IDs | gRNA sequence |
| 333 | CCTGCTGGTG | 1093 | CCUGCUGGUGGCUCCAGUUCGUUUAAGAGCUAAGCUGGAAACAGCAUAGCAAGUUUAA |
| | GCTCCAGTTC | | AUAAGGCUAGUCCGUUAUCAACUUGAAAAAGUGGCACCGAGUCGGUGCUUUUUU |
| 334 | CTGAACTGGA | 1094 | CUGAACUGGAGCCACCAGCAGUUUAAGAGCUAAGCUGGAAACAGCAUAGCAAGUUUAA |
| | GCCACCAGCA | | AUAAGGCUAGUCCGUUAUCAACUUGAAAAAGUGGCACCGAGUCGGUGCUUUUUU |
| 335 | CCTGAACTGG | 1095 | CCUGAACUGGAGCCACCAGCGUUUAAGAGCUAAGCUGGAAACAGCAUAGCAAGUUUAA |
| | AGCCACCAGC | | AUAAGGCUAGUCCGUUAUCAACUUGAAAAAGUGGCACCGAGUCGGUGCUUUUUU |
| 336 | CCTCGAGAAG | 1096 | CCUCGAGAAGAUUGACGAUAGUUUAAGAGCUAAGCUGGAAACAGCAUAGCAAGUUUAA |
| | ATTGACGATA | | AUAAGGCUAGUCCGUUAUCAACUUGAAAAAGUGGCACCGAGUCGGUGCUUUUUU |
| 337 | TCGTCAATCT | 1097 | UCGUCAAUCUUCUCGAGGAUGUUUAAGAGCUAAGCUGGAAACAGCAUAGCAAGUUUAA |
| | TCTCGAGGAT | | AUAAGGCUAGUCCGUUAUCAACUUGAAAAAGUGGCACCGAGUCGGUGCUUUUUU |
| 338 | CGTCAATCTT | 1098 | CGUCAAUCUUCUCGAGGAUUGUUUAAGAGCUAAGCUGGAAACAGCAUAGCAAGUUUAA |
| | CTCGAGGATT | | AUAAGGCUAGUCCGUUAUCAACUUGAAAAAGUGGCACCGAGUCGGUGCUUUUUU |
| 339 | GTCAATCTTC | 1099 | GUCAAUCUUCUCGAGGAUUGGUUUAAGAGCUAAGCUGGAAACAGCAUAGCAAGUUUAA |
| | TCGAGGATTG | | AUAAGGCUAGUCCGUUAUCAACUUGAAAAAGUGGCACCGAGUCGGUGCUUUUUU |
| 340 | AACATGGAGA | 1100 | AACAUGGAGAACAUCACAUCGUUUAAGAGCUAAGCUGGAAACAGCAUAGCAAGUUUAA |
| | ACATCACATC | | AUAAGGCUAGUCCGUUAUCAACUUGAAAAAGUGGCACCGAGUCGGUGCUUUUUU |
| 341 | AACATCACAT | 1101 | AACAUCACAUCAGGAUUCCUGUUUAAGAGCUAAGCUGGAAACAGCAUAGCAAGUUUAA |
| | CAGGATTCCT | | AUAAGGCUAGUCCGUUAUCAACUUGAAAAAGUGGCACCGAGUCGGUGCUUUUUU |
| 342 | CTAGACTCTG | 1102 | CUAGACUCUGCGGUAUUGUGGUUUAAGAGCUAAGCUGGAAACAGCAUAGCAAGUUUAA |
| | CGGTATTGTG | | AUAAGGCUAGUCCGUUAUCAACUUGAAAAAGUGGCACCGAGUCGGUGCUUUUUU |
| 343 | TACCGCAGAG | 1103 | UACCGCAGAGUCUAGACUCGGUUUAAGAGCUAAGCUGGAAACAGCAUAGCAAGUUUAA |
| | TCTAGACTCG | | AUAAGGCUAGUCCGUUAUCAACUUGAAAAAGUGGCACCGAGUCGGUGCUUUUUU |
| 344 | CGCAGAGTCT | 1104 | CGCAGAGUCUAGACUCGUGGGUUUAAGAGCUAAGCUGGAAACAGCAUAGCAAGUUUAA |
| | AGACTCGTGG | | AUAAGGCUAGUCCGUUAUCAACUUGAAAAAGUGGCACCGAGUCGGUGCUUUUUU |
| 345 | CACCACGAGT | 1105 | CACCACGAGUCUAGACUCUGGUUUAAGAGCUAAGCUGGAAACAGCAUAGCAAGUUUAA |
| | CTAGACTCTG | | AUAAGGCUAGUCCGUUAUCAACUUGAAAAAGUGGCACCGAGUCGGUGCUUUUUU |
| 346 | TGGACTTCTC | 1106 | UGGACUUCUCUCAAUUUUCUGUUUAAGAGCUAAGCUGGAAACAGCAUAGCAAGUUUAA |
| | TCAATTTTCT | | AUAAGGCUAGUCCGUUAUCAACUUGAAAAAGUGGCACCGAGUCGGUGCUUUUUU |
| 347 | GGACTTCTCT | 1107 | GGACUUCUCUCAAUUUUCUAGUUUAAGAGCUAAGCUGGAAACAGCAUAGCAAGUUUAA |
| | CAATTTTCTA | | AUAAGGCUAGUCCGUUAUCAACUUGAAAAAGUGGCACCGAGUCGGUGCUUUUUU |
| 348 | GACTTCTCTC | 1108 | GACUUCUCUCAAUUUUCUAGGUUUAAGAGCUAAGCUGGAAACAGCAUAGCAAGUUUAA |
| | AATTTTCTAG | | AUAAGGCUAGUCCGUUAUCAACUUGAAAAAGUGGCACCGAGUCGGUGCUUUUUU |
| 349 | ACTTCTCTCA | 1109 | ACUUCUCUCAAUUUUCUAGGGUUUAAGAGCUAAGCUGGAAACAGCAUAGCAAGUUUAA |
| | ATTTTCTAGG | | AUAAGGCUAGUCCGUUAUCAACUUGAAAAAGUGGCACCGAGUCGGUGCUUUUUU |
| 350 | CGAATTTTGG | 1110 | CGAAUUUUGGCCAAGACACAGUUUAAGAGCUAAGCUGGAAACAGCAUAGCAAGUUUAA |
| | CCAAGACACA | | AUAAGGCUAGUCCGUUAUCAACUUGAAAAAGUGGCACCGAGUCGGUGCUUUUUU |
| 351 | AGGTTGGGGA | 1111 | AGGUUGGGGACUGCGAAUUUGUUUAAGAGCUAAGCUGGAAACAGCAUAGCAAGUUUAA |
| | CTGCGAATTT | | AUAAGGCUAGUCCGUUAUCAACUUGAAAAAGUGGCACCGAGUCGGUGCUUUUUU |
| 352 | GGCATAGCAG | 1112 | GGCAUAGCAGCAGGAUGAAGGUUUAAGAGCUAAGCUGGAAACAGCAUAGCAAGUUUAA |
| | CAGGATGAAG | | AUAAGGCUAGUCCGUUAUCAACUUGAAAAAGUGGCACCGAGUCGGUGCUUUUUU |
| 353 | AGAAGATGAG | 1113 | AGAAGAUGAGGCAUAGCAGCGUUUAAGAGCUAAGCUGGAAACAGCAUAGCAAGUUUAA |
| | GCATAGCAGC | | AUAAGGCUAGUCCGUUAUCAACUUGAAAAAGUGGCACCGAGUCGGUGCUUUUUU |
| 354 | GCTATGCCTC | 1114 | GCUAUGCCUCAUCUUCUUGUGUUUAAGAGCUAAGCUGGAAACAGCAUAGCAAGUUUAA |
| | ATCTTCTTGT | | AUAAGGCUAGUCCGUUAUCAACUUGAAAAAGUGGCACCGAGUCGGUGCUUUUUU |
| 355 | GAAGAACCAA | 1115 | GAAGAACCAACAAGAAGAUGGUUUAAGAGCUAAGCUGGAAACAGCAUAGCAAGUUUAA |
| | CAAGAAGATG | | AUAAGGCUAGUCCGUUAUCAACUUGAAAAAGUGGCACCGAGUCGGUGCUUUUUU |
| 356 | CATCTTCTTG | 1116 | CAUCUUCUUGUUGGUUCUUCGUUUAAGAGCUAAGCUGGAAACAGCAUAGCAAGUUUAA |
| | TTGGTTCTTC | | AUAAGGCUAGUCCGUUAUCAACUUGAAAAAGUGGCACCGAGUCGGUGCUUUUUU |
| 357 | CCCGTTTGTC | 1117 | CCCGUUUGUCCUCUAAUUCCGUUUAAGAGCUAAGCUGGAAACAGCAUAGCAAGUUUAA |
| | CTCTAATTCC | | AUAAGGCUAGUCCGUUAUCAACUUGAAAAAGUGGCACCGAGUCGGUGCUUUUUU |
| 358 | CCTGGAATTA | 1118 | CCUGGAAUUAGAGGACAAACGUUUAAGAGCUAAGCUGGAAACAGCAUAGCAAGUUUAA |
| | GAGGACAAAC | | AUAAGGCUAGUCCGUUAUCAACUUGAAAAAGUGGCACCGAGUCGGUGCUUUUUU |
| 359 | TCCTGGAATT | 1119 | UCCUGGAAUUAGAGGACAAAGUUUAAGAGCUAAGCUGGAAACAGCAUAGCAAGUUUAA |
| | AGAGGACAAA | | AUAAGGCUAGUCCGUUAUCAACUUGAAAAAGUGGCACCGAGUCGGUGCUUUUUU |
| 360 | TACTAGTGCC | 1120 | UACUAGUGCCAUUUGUUCAGGUUUAAGAGCUAAGCUGGAAACAGCAUAGCAAGUUUAA |
| | ATTTGTTCAG | | AUAAGGCUAGUCCGUUAUCAACUUGAAAAAGUGGCACCGAGUCGGUGCUUUUUU |
| 361 | CCATTTGTTC | 1121 | CCAUUUGUUCAGUGGUUCGUGUUUAAGAGCUAAGCUGGAAACAGCAUAGCAAGUUUAA |
| | AGTGGTTCGT | | AUAAGGCUAGUCCGUUAUCAACUUGAAAAAGUGGCACCGAGUCGGUGCUUUUUU |
| 362 | CATTTGTTCA | 1122 | CAUUUGUUCAGUGGUUCGUAGUUUAAGAGCUAAGCUGGAAACAGCAUAGCAAGUUUAA |
| | GTGGTTCGTA | | AUAAGGCUAGUCCGUUAUCAACUUGAAAAAGUGGCACCGAGUCGGUGCUUUUUU |
| 363 | CCTACGAACC | 1123 | CCUACGAACCACUGAACAAAGUUUAAGAGCUAAGCUGGAAACAGCAUAGCAAGUUUAA |
| | ACTGAACAAA | | AUAAGGCUAGUCCGUUAUCAACUUGAAAAAGUGGCACCGAGUCGGUGCUUUUUU |
| 364 | TTTCAGTTAT | 1124 | UUUCAGUUAUAUGGAUGAUGGUUUAAGAGCUAAGCUGGAAACAGCAUAGCAAGUUUAA |
| | ATGGATGATG | | AUAAGGCUAGUCCGUUAUCAACUUGAAAAAGUGGCACCGAGUCGGUGCUUUUUU |
| 365 | CAAAAGAAAA | 1125 | CAAAAGAAAAUUGGUAACAGGUUUAAGAGCUAAGCUGGAAACAGCAUAGCAAGUUUAA |
| | TTGGTAACAG | | AUAAGGCUAGUCCGUUAUCAACUUGAAAAAGUGGCACCGAGUCGGUGCUUUUUU |
| 366 | TACCAATTTT | 1126 | UACCAAUUUUCUUUUGUCUUGUUUAAGAGCUAAGCUGGAAACAGCAUAGCAAGUUUAA |
| | CTTTTGTCTT | | AUAAGGCUAGUCCGUUAUCAACUUGAAAAAGUGGCACCGAGUCGGUGCUUUUUU |
| 367 | ACCAATTTTC | 1127 | ACCAAUUUUCUUUUGUCUUUGUUUAAGAGCUAAGCUGGAAACAGCAUAGCAAGUUUAA |
| | TTTTGTCTTT | | AUAAGGCUAGUCCGUUAUCAACUUGAAAAAGUGGCACCGAGUCGGUGCUUUUUU |
| 368 | ACCCAAAGAC | 1128 | ACCCAAAGACAAAAGAAAAUGUUUAAGAGCUAAGCUGGAAACAGCAUAGCAAGUUUAA |
| | AAAAGAAAAT | | AUAAGGCUAGUCCGUUAUCAACUUGAAAAAGUGGCACCGAGUCGGUGCUUUUUU |
| 369 | TGACATACTT | 1129 | UGACAUACUUUCCAAUCAAUGUUUAAGAGCUAAGCUGGAAACAGCAUAGCAAGUUUAA |
| | TCCAATCAAT | | AUAAGGCUAGUCCGUUAUCAACUUGAAAAAGUGGCACCGAGUCGGUGCUUUUUU |
| 370 | CACTTTCTCG | 1130 | CACUUUCUCGCCAACUUACAGUUUAAGAGCUAAGCUGGAAACAGCAUAGCAAGUUUAA |
| | CCAACTTACA | | AUAAGGCUAGUCCGUUAUCAACUUGAAAAAGUGGCACCGAGUCGGUGCUUUUUU |
| 371 | CACAGAAAGG | 1131 | CACAGAAAGGCCUUGUAAGUGUUUAAGAGCUAAGCUGGAAACAGCAUAGCAAGUUUAA |
| | CCTTGTAAGT | | AUAAGGCUAGUCCGUUAUCAACUUGAAAAAGUGGCACCGAGUCGGUGCUUUUUU |
| 372 | TGAACCTTTA | 1132 | UGAACCUUUACCCCGUUGCCGUUUAAGAGCUAAGCUGGAAACAGCAUAGCAAGUUUAA |
| | CCCCGTTGCC | | AUAAGGCUAGUCCGUUAUCAACUUGAAAAAGUGGCACCGAGUCGGUGCUUUUUU |
| 373 | GGGCAACGGG | 1133 | GGGCAACGGGGUAAAGGUUCGUUUAAGAGCUAAGCUGGAAACAGCAUAGCAAGUUUAA |
| | GTAAAGGTTC | | AUAAGGCUAGUCCGUUAUCAACUUGAAAAAGUGGCACCGAGUCGGUGCUUUUUU |
| 374 | TTTACCCCGT | 1134 | UUUACCCCGUUGCCCGGCAAGUUUAAGAGCUAAGCUGGAAACAGCAUAGCAAGUUUAA |
| | TGCCCGGCAA | | AUAAGGCUAGUCCGUUAUCAACUUGAAAAAGUGGCACCGAGUCGGUGCUUUUUU |
| 375 | GTTGCCGGGC | 1135 | GUUGCCGGGCAACGGGGUAAGUUUAAGAGCUAAGCUGGAAACAGCAUAGCAAGUUUAA |
| | AACGGGGTAA | | AUAAGGCUAGUCCGUUAUCAACUUGAAAAAGUGGCACCGAGUCGGUGCUUUUUU |
| 376 | CCCGTTGCCC | 1136 | CCCGUUGCCCGGCAACGGCCGUUUAAGAGCUAAGCUGGAAACAGCAUAGCAAGUUUAA |
| | GGCAACGGCC | | AUAAGGCUAGUCCGUUAUCAACUUGAAAAAGUGGCACCGAGUCGGUGCUUUUUU |
| 377 | CTGGCCGTTG | 1137 | CUGGCCGUUGCCGGGCAACGGUUUAAGAGCUAAGCUGGAAACAGCAUAGCAAGUUUAA |
| | CCGGGCAACG | | AUAAGGCUAGUCCGUUAUCAACUUGAAAAAGUGGCACCGAGUCGGUGCUUUUUU |
| 378 | CCTGGCCGTT | 1138 | CCUGGCCGUUGCCGGGCAACGUUUAAGAGCUAAGCUGGAAACAGCAUAGCAAGUUUAA |
| | GCCGGGCAAC | | AUAAGGCUAGUCCGUUAUCAACUUGAAAAAGUGGCACCGAGUCGGUGCUUUUUU |
| 379 | ACCTGGCCGT | 1139 | ACCUGGCCGUUGCCGGGCAAGUUUAAGAGCUAAGCUGGAAACAGCAUAGCAAGUUUAA |
| | TGCCGGGCAA | | AUAAGGCUAGUCCGUUAUCAACUUGAAAAAGUGGCACCGAGUCGGUGCUUUUUU |
| 380 | GCACAGACCT | 1140 | GCACAGACCUGGCCGUUGCCGUUUAAGAGCUAAGCUGGAAACAGCAUAGCAAGUUUAA |
| | GGCCGTTGCC | | AUAAGGCUAGUCCGUUAUCAACUUGAAAAAGUGGCACCGAGUCGGUGCUUUUUU |
| 381 | GGCACAGACC | 1141 | GGCACAGACCUGGCCGUUGCGUUUAAGAGCUAAGCUGGAAACAGCAUAGCAAGUUUAA |
| | TGGCCGTTGC | | AUAAGGCUAGUCCGUUAUCAACUUGAAAAAGUGGCACCGAGUCGGUGCUUUUUU |
| 382 | GCAAACACTT | 1142 | GCAAACACUUGGCACAGACCGUUUAAGAGCUAAGCUGGAAACAGCAUAGCAAGUUUAA |
| | GGCACAGACC | | AUAAGGCUAGUCCGUUAUCAACUUGAAAAAGUGGCACCGAGUCGGUGCUUUUUU |
| 383 | GGGTTGCGTC | 1143 | GGGUUGCGUCAGCAAACACUGUUUAAGAGCUAAGCUGGAAACAGCAUAGCAAGUUUAA |
| | AGCAAACACT | | AUAAGGCUAGUCCGUUAUCAACUUGAAAAAGUGGCACCGAGUCGGUGCUUUUUU |
| 384 | TTTGCTGACG | 1144 | UUUGCUGACGCAACCCCCACGUUUAAGAGCUAAGCUGGAAACAGCAUAGCAAGUUUAA |
| | CAACCCCCAC | | AUAAGGCUAGUCCGUUAUCAACUUGAAAAAGUGGCACCGAGUCGGUGCUUUUUU |
| 385 | CTGACGCAAC | 1145 | CUGACGCAACCCCCACUGGCGUUUAAGAGCUAAGCUGGAAACAGCAUAGCAAGUUUAA |
| | CCCCACTGGC | | AUAAGGCUAGUCCGUUAUCAACUUGAAAAAGUGGCACCGAGUCGGUGCUUUUUU |
| 386 | TGACGCAACC | 1146 | UGACGCAACCCCCACUGGCUGUUUAAGAGCUAAGCUGGAAACAGCAUAGCAAGUUUAA |
| | CCCACTGGCT | | AUAAGGCUAGUCCGUUAUCAACUUGAAAAAGUGGCACCGAGUCGGUGCUUUUUU |
| 387 | GACGCAACCC | 1147 | GACGCAACCCCCACUGGCUGGUUUAAGAGCUAAGCUGGAAACAGCAUAGCAAGUUUAA |
| | CCACTGGCTG | | AUAAGGCUAGUCCGUUAUCAACUUGAAAAAGUGGCACCGAGUCGGUGCUUUUUU |
| 388 | AACCCCCACT | 1148 | AACCCCCACUGGCUGGGGCUGUUUAAGAGCUAAGCUGGAAACAGCAUAGCAAGUUUAA |
| | GGCTGGGGCT | | AUAAGGCUAGUCCGUUAUCAACUUGAAAAAGUGGCACCGAGUCGGUGCUUUUUU |
| 389 | TCCTCTGCCG | 1149 | UCCUCUGCCGAUCCAUACUGGUUUAAGAGCUAAGCUGGAAACAGCAUAGCAAGUUUAA |
| | ATCCATACTG | | AUAAGGCUAGUCCGUUAUCAACUUGAAAAAGUGGCACCGAGUCGGUGCUUUUUU |
| 390 | TCCGCAGTAT | 1150 | UCCGCAGUAUGGAUCGGCAGGUUUAAGAGCUAAGCUGGAAACAGCAUAGCAAGUUUAA |
| | GGATCGGCAG | | AUAAGGCUAGUCCGUUAUCAACUUGAAAAAGUGGCACCGAGUCGGUGCUUUUUU |
| 391 | AGGAGTTCCG | 1151 | AGGAGUUCCGCAGUAUGGAUGUUUAAGAGCUAAGCUGGAAACAGCAUAGCAAGUUUAA |
| | CAGTATGGAT | | AUAAGGCUAGUCCGUUAUCAACUUGAAAAAGUGGCACCGAGUCGGUGCUUUUUU |
| 392 | CGGCTAGGAG | 1152 | CGGCUAGGAGUUCCGCAGUAGUUUAAGAGCUAAGCUGGAAACAGCAUAGCAAGUUUAA |
| | TTCCGCAGTA | | AUAAGGCUAGUCCGUUAUCAACUUGAAAAAGUGGCACCGAGUCGGUGCUUUUUU |
| 393 | TGCGAGCAAA | 1153 | UGCGAGCAAAACAAGCGGCUGUUUAAGAGCUAAGCUGGAAACAGCAUAGCAAGUUUAA |
| | ACAAGCGGCT | | AUAAGGCUAGUCCGUUAUCAACUUGAAAAAGUGGCACCGAGUCGGUGCUUUUUU |
| 394 | CCGCTTGTTT | 1154 | CCGCUUGUUUUGCUCGCAGCGUUUAAGAGCUAAGCUGGAAACAGCAUAGCAAGUUUAA |
| | TGCTCGCAGC | | AUAAGGCUAGUCCGUUAUCAACUUGAAAAAGUGGCACCGAGUCGGUGCUUUUUU |
| 395 | CCTGCTGCGA | 1155 | CCUGCUGCGAGCAAAACAAGGUUUAAGAGCUAAGCUGGAAACAGCAUAGCAAGUUUAA |
| | GCAAAACAAG | | AUAAGGCUAGUCCGUUAUCAACUUGAAAAAGUGGCACCGAGUCGGUGCUUUUUU |
| 396 | TGTTTTGCTC | 1156 | UGUUUUGCUCGCAGCAGGUCGUUUAAGAGCUAAGCUGGAAACAGCAUAGCAAGUUUAA |
| | GCAGCAGGTC | | AUAAGGCUAGUCCGUUAUCAACUUGAAAAAGUGGCACCGAGUCGGUGCUUUUUU |
| 397 | GCAGCACAGC | 1157 | GCAGCACAGCCUAGCAGCCAGUUUAAGAGCUAAGCUGGAAACAGCAUAGCAAGUUUAA |
| | CTAGCAGCCA | | AUAAGGCUAGUCCGUUAUCAACUUGAAAAAGUGGCACCGAGUCGGUGCUUUUUU |
| 398 | TGCTAGGCTG | 1158 | UGCUAGGCUGUGCUGCCAACGUUUAAGAGCUAAGCUGGAAACAGCAUAGCAAGUUUAA |
| | TGCTGCCAAC | | AUAAGGCUAGUCCGUUAUCAACUUGAAAAAGUGGCACCGAGUCGGUGCUUUUUU |
| 399 | GCTGCCAACT | 1159 | GCUGCCAACUGGAUCCUGCGGUUUAAGAGCUAAGCUGGAAACAGCAUAGCAAGUUUAA |
| | GGATCCTGCG | | AUAAGGCUAGUCCGUUAUCAACUUGAAAAAGUGGCACCGAGUCGGUGCUUUUUU |
| 400 | CTGCCAACTG | 1160 | CUGCCAACUGGAUCCUGCGCGUUUAAGAGCUAAGCUGGAAACAGCAUAGCAAGUUUAA |
| | GATCCTGCGC | | AUAAGGCUAGUCCGUUAUCAACUUGAAAAAGUGGCACCGAGUCGGUGCUUUUUU |
| 401 | CGTCCCGCGC | 1161 | CGUCCCGCGCAGGAUCCAGUGUUUAAGAGCUAAGCUGGAAACAGCAUAGCAAGUUUAA |
| | AGGATCCAGT | | AUAAGGCUAGUCCGUUAUCAACUUGAAAAAGUGGCACCGAGUCGGUGCUUUUUU |
| 402 | AAACAAAGGA | 1162 | AAACAAAGGACGUCCCGCGCGUUUAAGAGCUAAGCUGGAAACAGCAUAGCAAGUUUAA |
| | CGTCCCGCGC | | AUAAGGCUAGUCCGUUAUCAACUUGAAAAAGUGGCACCGAGUCGGUGCUUUUUU |
| 403 | GTCCTTTGTT | 1163 | GUCCUUUGUUUACGUCCCGUGUUUAAGAGCUAAGCUGGAAACAGCAUAGCAAGUUUAA |
| | TACGTCCCGT | | AUAAGGCUAGUCCGUUAUCAACUUGAAAAAGUGGCACCGAGUCGGUGCUUUUUU |
| 404 | CGCCGACGGG | 1164 | CGCCGACGGGACGUAAACAAGUUUAAGAGCUAAGCUGGAAACAGCAUAGCAAGUUUAA |
| | ACGTAAACAA | | AUAAGGCUAGUCCGUUAUCAACUUGAAAAAGUGGCACCGAGUCGGUGCUUUUUU |
| 405 | TGCCGTTCCG | 1165 | UGCCGUUCCGACCGACCACGGUUUAAGAGCUAAGCUGGAAACAGCAUAGCAAGUUUAA |
| | ACCGACCACG | | AUAAGGCUAGUCCGUUAUCAACUUGAAAAAGUGGCACCGAGUCGGUGCUUUUUU |
| 406 | AGGTGCGCCC | 1166 | AGGUGCGCCCCGUGGUCGGUGUUUAAGAGCUAAGCUGGAAACAGCAUAGCAAGUUUAA |
| | CGTGGTCGGT | | AUAAGGCUAGUCCGUUAUCAACUUGAAAAAGUGGCACCGAGUCGGUGCUUUUUU |
| 407 | AGAGAGGTGC | 1167 | AGAGAGGUGCGCCCCGUGGUGUUUAAGAGCUAAGCUGGAAACAGCAUAGCAAGUUUAA |
| | GCCCCGTGGT | | AUAAGGCUAGUCCGUUAUCAACUUGAAAAAGUGGCACCGAGUCGGUGCUUUUUU |
| 408 | GTAAAGAGAG | 1168 | GUAAAGAGAGGUGCGCCCCGGUUUAAGAGCUAAGCUGGAAACAGCAUAGCAAGUUUAA |
| | GTGCGCCCCG | | AUAAGGCUAGUCCGUUAUCAACUUGAAAAAGUGGCACCGAGUCGGUGCUUUUUU |
| 409 | GGGGCGCACC | 1169 | GGGGCGCACCUCUCUUUACGGUUUAAGAGCUAAGCUGGAAACAGCAUAGCAAGUUUAA |
| | TCTCTTTACG | | AUAAGGCUAGUCCGUUAUCAACUUGAAAAAGUGGCACCGAGUCGGUGCUUUUUU |
| 410 | CGGGGAGTCC | 1170 | CGGGGAGUCCGCGUAAAGAGGUUUAAGAGCUAAGCUGGAAACAGCAUAGCAAGUUUAA |
| | GCGTAAAGAG | | AUAAGGCUAGUCCGUUAUCAACUUGAAAAAGUGGCACCGAGUCGGUGCUUUUUU |
| 411 | CAGATGAGAA | 1171 | CAGAUGAGAAGGCACAGACGGUUUAAGAGCUAAGCUGGAAACAGCAUAGCAAGUUUAA |
| | GGCACAGACG | | AUAAGGCUAGUCCGUUAUCAACUUGAAAAAGUGGCACCGAGUCGGUGCUUUUUU |
| 412 | GTCTGTGCCT | 1172 | GUCUGUGCCUUCUCAUCUGCGUUUAAGAGCUAAGCUGGAAACAGCAUAGCAAGUUUAA |
| | TCTCATCTGC | | AUAAGGCUAGUCCGUUAUCAACUUGAAAAAGUGGCACCGAGUCGGUGCUUUUUU |
| 413 | GGCAGATGAG | 1173 | GGCAGAUGAGAAGGCACAGAGUUUAAGAGCUAAGCUGGAAACAGCAUAGCAAGUUUAA |
| | AAGGCACAGA | | AUAAGGCUAGUCCGUUAUCAACUUGAAAAAGUGGCACCGAGUCGGUGCUUUUUU |
| 414 | GCAGATGAGA | 1174 | GCAGAUGAGAAGGCACAGACGUUUAAGAGCUAAGCUGGAAACAGCAUAGCAAGUUUAA |
| | AGGCACAGAC | | AUAAGGCUAGUCCGUUAUCAACUUGAAAAAGUGGCACCGAGUCGGUGCUUUUUU |
| 415 | ACACGGTCCG | 1175 | ACACGGUCCGGCAGAUGAGAGUUUAAGAGCUAAGCUGGAAACAGCAUAGCAAGUUUAA |
| | GCAGATGAGA | | AUAAGGCUAGUCCGUUAUCAACUUGAAAAAGUGGCACCGAGUCGGUGCUUUUUU |
| 416 | GAAGCGAAGT | 1176 | GAAGCGAAGUGCACACGGUCGUUUAAGAGCUAAGCUGGAAACAGCAUAGCAAGUUUAA |
| | GCACACGGTC | | AUAAGGCUAGUCCGUUAUCAACUUGAAAAAGUGGCACCGAGUCGGUGCUUUUUU |
| 417 | GAGGTGAAGC | 1177 | GAGGUGAAGCGAAGUGCACAGUUUAAGAGCUAAGCUGGAAACAGCAUAGCAAGUUUAA |
| | GAAGTGCACA | | AUAAGGCUAGUCCGUUAUCAACUUGAAAAAGUGGCACCGAGUCGGUGCUUUUUU |
| 418 | CTTCACCTCT | 1178 | CUUCACCUCUGCACGUCGCAGUUUAAGAGCUAAGCUGGAAACAGCAUAGCAAGUUUAA |
| | GCACGTCGCA | | AUAAGGCUAGUCCGUUAUCAACUUGAAAAAGUGGCACCGAGUCGGUGCUUUUUU |
| 419 | GGTCTCCATG | 1179 | GGUCUCCAUGCGACGUGCAGGUUUAAGAGCUAAGCUGGAAACAGCAUAGCAAGUUUAA |
| | CGACGTGCAG | | AUAAGGCUAGUCCGUUAUCAACUUGAAAAAGUGGCACCGAGUCGGUGCUUUUUU |
| 420 | TGCCCAAGGT | 1180 | UGCCCAAGGUCUUACAUAAGGUUUAAGAGCUAAGCUGGAAACAGCAUAGCAAGUUUAA |
| | CTTACATAAG | | AUAAGGCUAGUCCGUUAUCAACUUGAAAAAGUGGCACCGAGUCGGUGCUUUUUU |
| 421 | GTCCTCTTAT | 1181 | GUCCUCUUAUGUAAGACCUUGUUUAAGAGCUAAGCUGGAAACAGCAUAGCAAGUUUAA |
| | GTAAGACCTT | | AUAAGGCUAGUCCGUUAUCAACUUGAAAAAGUGGCACCGAGUCGGUGCUUUUUU |
| 422 | AGTCCTCTTA | 1182 | AGUCCUCUUAUGUAAGACCUGUUUAAGAGCUAAGCUGGAAACAGCAUAGCAAGUUUAA |
| | TGTAAGACCT | | AUAAGGCUAGUCCGUUAUCAACUUGAAAAAGUGGCACCGAGUCGGUGCUUUUUU |
| 423 | GTCTTACATA | 1183 | GUCUUACAUAAGAGGACUCUGUUUAAGAGCUAAGCUGGAAACAGCAUAGCAAGUUUAA |
| | AGAGGACTCT | | AUAAGGCUAGUCCGUUAUCAACUUGAAAAAGUGGCACCGAGUCGGUGCUUUUUU |
| 424 | AATGTCAACG | 1184 | AAUGUCAACGACCGACCUUGGUUUAAGAGCUAAGCUGGAAACAGCAUAGCAAGUUUAA |
| | ACCGACCTTG | | AUAAGGCUAGUCCGUUAUCAACUUGAAAAAGUGGCACCGAGUCGGUGCUUUUUU |
| 425 | TTTGAAGTAT | 1185 | UUUGAAGUAUGCCUCAAGGUGUUUAAGAGCUAAGCUGGAAACAGCAUAGCAAGUUUAA |
| | GCCTCAAGGT | | AUAAGGCUAGUCCGUUAUCAACUUGAAAAAGUGGCACCGAGUCGGUGCUUUUUU |
| 426 | AGTCTTTGAA | 1186 | AGUCUUUGAAGUAUGCCUCAGUUUAAGAGCUAAGCUGGAAACAGCAUAGCAAGUUUAA |
| | GTATGCCTCA | | AUAAGGCUAGUCCGUUAUCAACUUGAAAAAGUGGCACCGAGUCGGUGCUUUUUU |
| 427 | AAGACTGTTT | 1187 | AAGACUGUUUGUUUAAAGACGUUUAAGAGCUAAGCUGGAAACAGCAUAGCAAGUUUAA |
| | GTTTAAAGAC | | AUAAGGCUAGUCCGUUAUCAACUUGAAAAAGUGGCACCGAGUCGGUGCUUUUUU |
| 428 | AGACTGTTTG | 1188 | AGACUGUUUGUUUAAAGACUGUUUAAGAGCUAAGCUGGAAACAGCAUAGCAAGUUUAA |
| | TTTAAAGACT | | AUAAGGCUAGUCCGUUAUCAACUUGAAAAAGUGGCACCGAGUCGGUGCUUUUUU |
| 429 | CTGTTTGTTT | 1189 | CUGUUUGUUUAAAGACUGGGGUUUAAGAGCUAAGCUGGAAACAGCAUAGCAAGUUUAA |
| | AAAGACTGGG | | AUAAGGCUAGUCCGUUAUCAACUUGAAAAAGUGGCACCGAGUCGGUGCUUUUUU |
| 430 | GTTTAAAGAC | 1190 | GUUUAAAGACUGGGAGGAGUGUUUAAGAGCUAAGCUGGAAACAGCAUAGCAAGUUUAA |
| | TGGGAGGAGT | | AUAAGGCUAGUCCGUUAUCAACUUGAAAAAGUGGCACCGAGUCGGUGCUUUUUU |
| 431 | TCTTTGTACT | 1191 | UCUUUGUACUAGGAGGCUGUGUUUAAGAGCUAAGCUGGAAACAGCAUAGCAAGUUUAA |
| | AGGAGGCTGT | | AUAAGGCUAGUCCGUUAUCAACUUGAAAAAGUGGCACCGAGUCGGUGCUUUUUU |
| 432 | AGGAGGCTGT | 1192 | AGGAGGCUGUAGGCAUAAAUGUUUAAGAGCUAAGCUGGAAACAGCAUAGCAAGUUUAA |
| | AGGCATAAAT | | AUAAGGCUAGUCCGUUAUCAACUUGAAAAAGUGGCACCGAGUCGGUGCUUUUUU |
| 433 | GTGAAAAAGT | 1193 | GUGAAAAAGUUGCAUGGUGCGUUUAAGAGCUAAGCUGGAAACAGCAUAGCAAGUUUAA |
| | TGCATGGTGC | | AUAAGGCUAGUCCGUUAUCAACUUGAAAAAGUGGCACCGAGUCGGUGCUUUUUU |
| 434 | GCAGAGGTGA | 1194 | GCAGAGGUGAAAAAGUUGCAGUUUAAGAGCUAAGCUGGAAACAGCAUAGCAAGUUUAA |
| | AAAAGTTGCA | | AUAAGGCUAGUCCGUUAUCAACUUGAAAAAGUGGCACCGAGUCGGUGCUUUUUU |
| 435 | AACAAGAGAT | 1195 | AACAAGAGAUGAUUAGGCAGGUUUAAGAGCUAAGCUGGAAACAGCAUAGCAAGUUUAA |
| | GATTAGGCAG | | AUAAGGCUAGUCCGUUAUCAACUUGAAAAAGUGGCACCGAGUCGGUGCUUUUUU |
| 436 | GACATGAACA | 1196 | GACAUGAACAAGAGAUGAUUGUUUAAGAGCUAAGCUGGAAACAGCAUAGCAAGUUUAA |
| | AGAGATGATT | | AUAAGGCUAGUCCGUUAUCAACUUGAAAAAGUGGCACCGAGUCGGUGCUUUUUU |
| 437 | AGCTTGGAGG | 1197 | AGCUUGGAGGCUUGAACAGUGUUUAAGAGCUAAGCUGGAAACAGCAUAGCAAGUUUAA |
| | CTTGAACAGT | | AUAAGGCUAGUCCGUUAUCAACUUGAAAAAGUGGCACCGAGUCGGUGCUUUUUU |
| 438 | CAAGCCTCCA | 1198 | CAAGCCUCCAAGCUGUGCCUGUUUAAGAGCUAAGCUGGAAACAGCAUAGCAAGUUUAA |
| | AGCTGTGCCT | | AUAAGGCUAGUCCGUUAUCAACUUGAAAAAGUGGCACCGAGUCGGUGCUUUUUU |
| 439 | AAGCCTCCAA | 1199 | AAGCCUCCAAGCUGUGCCUUGUUUAAGAGCUAAGCUGGAAACAGCAUAGCAAGUUUAA |
| | GCTGTGCCTT | | AUAAGGCUAGUCCGUUAUCAACUUGAAAAAGUGGCACCGAGUCGGUGCUUUUUU |
| 440 | CCTCCAAGCT | 1200 | CCUCCAAGCUGUGCCUUGGGGUUUAAGAGCUAAGCUGGAAACAGCAUAGCAAGUUUAA |
| | GTGCCTTGGG | | AUAAGGCUAGUCCGUUAUCAACUUGAAAAAGUGGCACCGAGUCGGUGCUUUUUU |
| 441 | CCACCCAAGG | 1201 | CCACCCAAGGCACAGCUUGGGUUUAAGAGCUAAGCUGGAAACAGCAUAGCAAGUUUAA |
| | CACAGCTTGG | | AUAAGGCUAGUCCGUUAUCAACUUGAAAAAGUGGCACCGAGUCGGUGCUUUUUU |
| 442 | AGCTGTGCCT | 1202 | AGCUGUGCCUUGGGUGGCUUGUUUAAGAGCUAAGCUGGAAACAGCAUAGCAAGUUUAA |
| | TGGGTGGCTT | | AUAAGGCUAGUCCGUUAUCAACUUGAAAAAGUGGCACCGAGUCGGUGCUUUUUU |
| 443 | AAGCCACCCA | 1203 | AAGCCACCCAAGGCACAGCUGUUUAAGAGCUAAGCUGGAAACAGCAUAGCAAGUUUAA |
| | AGGCACAGCT | | AUAAGGCUAGUCCGUUAUCAACUUGAAAAAGUGGCACCGAGUCGGUGCUUUUUU |
| 444 | GCTGTGCCTT | 1204 | GCUGUGCCUUGGGUGGCUUUGUUUAAGAGCUAAGCUGGAAACAGCAUAGCAAGUUUAA |
| | GGGTGGCTTT | | AUAAGGCUAGUCCGUUAUCAACUUGAAAAAGUGGCACCGAGUCGGUGCUUUUUU |
| 445 | CTGTGCCTTG | 1205 | CUGUGCCUUGGGUGGCUUUGGUUUAAGAGCUAAGCUGGAAACAGCAUAGCAAGUUUAA |
| | GGTGGCTTTG | | AUAAGGCUAGUCCGUUAUCAACUUGAAAAAGUGGCACCGAGUCGGUGCUUUUUU |
| 446 | TAGCTCCAAA | 1206 | UAGCUCCAAAUUCUUUAUAAGUUUAAGAGCUAAGCUGGAAACAGCAUAGCAAGUUUAA |
| | TTCTTTATAA | | AUAAGGCUAGUCCGUUAUCAACUUGAAAAAGUGGCACCGAGUCGGUGCUUUUUU |
| 447 | GTAGCTCCAA | 1207 | GUAGCUCCAAAUUCUUUAUAGUUUAAGAGCUAAGCUGGAAACAGCAUAGCAAGUUUAA |
| | ATTCTTTATA | | AUAAGGCUAGUCCGUUAUCAACUUGAAAAAGUGGCACCGAGUCGGUGCUUUUUU |
| 448 | TAAAGAATTT | 1208 | UAAAGAAUUUGGAGCUACUGGUUUAAGAGCUAAGCUGGAAACAGCAUAGCAAGUUUAA |
| | GGAGCTACTG | | AUAAGGCUAGUCCGUUAUCAACUUGAAAAAGUGGCACCGAGUCGGUGCUUUUUU |
| 449 | ATGACTCTAG | 1209 | AUGACUCUAGCUACCUGGGUGUUUAAGAGCUAAGCUGGAAACAGCAUAGCAAGUUUAA |
| | CTACCTGGGT | | AUAAGGCUAGUCCGUUAUCAACUUGAAAAAGUGGCACCGAGUCGGUGCUUUUUU |
| 450 | CACATTTCTT | 1210 | CACAUUUCUUGUCUCACUUUGUUUAAGAGCUAAGCUGGAAACAGCAUAGCAAGUUUAA |
| | GTCTCACTTT | | AUAAGGCUAGUCCGUUAUCAACUUGAAAAAGUGGCACCGAGUCGGUGCUUUUUU |
| 451 | TAGTTTCCGG | 1211 | UAGUUUCCGGAAGUGUUGAUGUUUAAGAGCUAAGCUGGAAACAGCAUAGCAAGUUUAA |
| | AAGTGTTGAT | | AUAAGGCUAGUCCGUUAUCAACUUGAAAAAGUGGCACCGAGUCGGUGCUUUUUU |
| 452 | CGTCTAACAA | 1212 | CGUCUAACAACAGUAGUUUCGUUUAAGAGCUAAGCUGGAAACAGCAUAGCAAGUUUAA |
| | CAGTAGTTTC | | AUAAGGCUAGUCCGUUAUCAACUUGAAAAAGUGGCACCGAGUCGGUGCUUUUUU |
| 453 | ACTACTGTTG | 1213 | ACUACUGUUGUUAGACGACGGUUUAAGAGCUAAGCUGGAAACAGCAUAGCAAGUUUAA |
| | TTAGACGACG | | AUAAGGCUAGUCCGUUAUCAACUUGAAAAAGUGGCACCGAGUCGGUGCUUUUUU |
| 454 | CTGTTGTTAG | 1214 | CUGUUGUUAGACGACGAGGCGUUUAAGAGCUAAGCUGGAAACAGCAUAGCAAGUUUAA |
| | ACGACGAGGC | | AUAAGGCUAGUCCGUUAUCAACUUGAAAAAGUGGCACCGAGUCGGUGCUUUUUU |
| 455 | CGAGGGAGTT | 1215 | CGAGGGAGUUCUUCUUCUAGGUUUAAGAGCUAAGCUGGAAACAGCAUAGCAAGUUUAA |
| | CTTCTTCTAG | | AUAAGGCUAGUCCGUUAUCAACUUGAAAAAGUGGCACCGAGUCGGUGCUUUUUU |
| 456 | GCGAGGGAGT | 1216 | GCGAGGGAGUUCUUCUUCUAGUUUAAGAGCUAAGCUGGAAACAGCAUAGCAAGUUUAA |
| | TCTTCTTCTA | | AUAAGGCUAGUCCGUUAUCAACUUGAAAAAGUGGCACCGAGUCGGUGCUUUUUU |
| 457 | GGCGAGGGAG | 1217 | GGCGAGGGAGUUCUUCUUCUGUUUAAGAGCUAAGCUGGAAACAGCAUAGCAAGUUUAA |
| | TTCTTCTTCT | | AUAAGGCUAGUCCGUUAUCAACUUGAAAAAGUGGCACCGAGUCGGUGCUUUUUU |
| 458 | CTCCCTCGCC | 1218 | CUCCCUCGCCUCGCAGACGAGUUUAAGAGCUAAGCUGGAAACAGCAUAGCAAGUUUAA |
| | TCGCAGACGA | | AUAAGGCUAGUCCGUUAUCAACUUGAAAAAGUGGCACCGAGUCGGUGCUUUUUU |
| 459 | GACCTTCGTC | 1219 | GACCUUCGUCUGCGAGGCGAGUUUAAGAGCUAAGCUGGAAACAGCAUAGCAAGUUUAA |
| | TGCGAGGCGA | | AUAAGGCUAGUCCGUUAUCAACUUGAAAAAGUGGCACCGAGUCGGUGCUUUUUU |
| 460 | AGACCTTCGT | 1220 | AGACCUUCGUCUGCGAGGCGGUUUAAGAGCUAAGCUGGAAACAGCAUAGCAAGUUUAA |
| | CTGCGAGGCG | | AUAAGGCUAGUCCGUUAUCAACUUGAAAAAGUGGCACCGAGUCGGUGCUUUUUU |
| 461 | GATTGAGACC | 1221 | GAUUGAGACCUUCGUCUGCGGUUUAAGAGCUAAGCUGGAAACAGCAUAGCAAGUUUAA |
| | TTCGTCTGCG | | AUAAGGCUAGUCCGUUAUCAACUUGAAAAAGUGGCACCGAGUCGGUGCUUUUUU |
| 462 | GATTGAGATC | 1222 | GAUUGAGAUCUUCUGCGACGGUUUAAGAGCUAAGCUGGAAACAGCAUAGCAAGUUUAA |
| | TTCTGCGACG | | AUAAGGCUAGUCCGUUAUCAACUUGAAAAAGUGGCACCGAGUCGGUGCUUUUUU |
| 463 | GTCGCAGAAG | 1223 | GUCGCAGAAGAUCUCAAUCUGUUUAAGAGCUAAGCUGGAAACAGCAUAGCAAGUUUAA |
| | ATCTCAATCT | | AUAAGGCUAGUCCGUUAUCAACUUGAAAAAGUGGCACCGAGUCGGUGCUUUUUU |
| 464 | TCGCAGAAGA | 1224 | UCGCAGAAGAUCUCAAUCUCGUUUAAGAGCUAAGCUGGAAACAGCAUAGCAAGUUUAA |
| | TCTCAATCTC | | AUAAGGCUAGUCCGUUAUCAACUUGAAAAAGUGGCACCGAGUCGGUGCUUUUUU |
| 465 | ATATGGTGAC | 1225 | AUAUGGUGACCCACAAAAUGGUUUAAGAGCUAAGCUGGAAACAGCAUAGCAAGUUUAA |
| | CCACAAAATG | | AUAAGGCUAGUCCGUUAUCAACUUGAAAAAGUGGCACCGAGUCGGUGCUUUUUU |
| 466 | TTTGTGGGTC | 1226 | UUUGUGGGUCACCAUAUUCUGUUUAAGAGCUAAGCUGGAAACAGCAUAGCAAGUUUAA |
| | ACCATATTCT | | AUAAGGCUAGUCCGUUAUCAACUUGAAAAAGUGGCACCGAGUCGGUGCUUUUUU |
| 467 | TTGTGGGTCA | 1227 | UUGUGGGUCACCAUAUUCUUGUUUAAGAGCUAAGCUGGAAACAGCAUAGCAAGUUUAA |
| | CCATATTCTT | | AUAAGGCUAGUCCGUUAUCAACUUGAAAAAGUGGCACCGAGUCGGUGCUUUUUU |
| 468 | GCTGGATCCA | 1228 | GCUGGAUCCAACUGGUGGUCGUUUAAGAGCUAAGCUGGAAACAGCAUAGCAAGUUUAA |
| | ACTGGTGGTC | | AUAAGGCUAGUCCGUUAUCAACUUGAAAAAGUGGCACCGAGUCGGUGCUUUUUU |
| 469 | CACCCCAAAA | 1229 | CACCCCAAAAGGCCUCCGUGGUUUAAGAGCUAAGCUGGAAACAGCAUAGCAAGUUUAA |
| | GGCCTCCGTG | | AUAAGGCUAGUCCGUUAUCAACUUGAAAAAGUGGCACCGAGUCGGUGCUUUUUU |
| 470 | CCTTTTGGGG | 1230 | CCUUUUGGGGUGGAGCCCUCGUUUAAGAGCUAAGCUGGAAACAGCAUAGCAAGUUUAA |
| | TGGAGCCCTC | | AUAAGGCUAGUCCGUUAUCAACUUGAAAAAGUGGCACCGAGUCGGUGCUUUUUU |
| 471 | CCTGAGGGCT | 1231 | CCUGAGGGCUCCACCCCAAAGUUUAAGAGCUAAGCUGGAAACAGCAUAGCAAGUUUAA |
| | CCACCCCAAA | | AUAAGGCUAGUCCGUUAUCAACUUGAAAAAGUGGCACCGAGUCGGUGCUUUUUU |
| 472 | GGGGTGGAGC | 1232 | GGGGUGGAGCCCUCAGGCUCGUUUAAGAGCUAAGCUGGAAACAGCAUAGCAAGUUUAA |
| | CCTCAGGCTC | | AUAAGGCUAGUCCGUUAUCAACUUGAAAAAGUGGCACCGAGUCGGUGCUUUUUU |
| 473 | GGGTGGAGCC | 1233 | GGGUGGAGCCCUCAGGCUCAGUUUAAGAGCUAAGCUGGAAACAGCAUAGCAAGUUUAA |
| | CTCAGGCTCA | | AUAAGGCUAGUCCGUUAUCAACUUGAAAAAGUGGCACCGAGUCGGUGCUUUUUU |
| 474 | CGATTGGTGG | 1234 | CGAUUGGUGGAGGCAGGAGGGUUUAAGAGCUAAGCUGGAAACAGCAUAGCAAGUUUAA |
| | AGGCAGGAGG | | AUAAGGCUAGUCCGUUAUCAACUUGAAAAAGUGGCACCGAGUCGGUGCUUUUUU |
| 475 | CTCATCCTCA | 1235 | CUCAUCCUCAGGCCAUGCAGGUUUAAGAGCUAAGCUGGAAACAGCAUAGCAAGUUUAA |
| | GGCCATGCAG | | AUAAGGCUAGUCCGUUAUCAACUUGAAAAAGUGGCACCGAGUCGGUGCUUUUUU |

TABLE 15
Exemplary target domain sequences and effect on HbeAg and HbsAg expression

| | Associated | | | |
|---|---|---|---|---|
| | guide RNA | | HbeAg (% expression of | |
| SEQ | name (if | Target domain | non targeting | HbsAg (% expression of |
| IDs | applicable) | sequence | control) | non targeting control) |
| 334 | gRNA#001 | CTGAACTGGAGCCACCAGCA | 27.77203753 | 23.4507853 |
| 335 | gRNA#002 | CCTGAACTGGAGCCACCAGC | 41.3794605 | 42.3814023 |
| 333 | | CCTGCTGGTGGCTCCAGTTC | 65.36067834 | 43.2303179 |
| 336 | | CCTCGAGAAGATTGACGATA | 82.8943107 | 72.648219 |
| 337 | | TCGTCAATCTTCTCGAGGAT | 45.82985382 | 59.7223204 |
| 338 | | CGTCAATCTTCTCGAGGATT | 70.38176383 | 73.1313979 |
| 339 | | GTCAATCTTCTCGAGGATTG | 51.92713248 | 54.330978 |
| 340 | | AACATGGAGAACATCACATC | 79.31612772 | 80.8981286 |
| 341 | | AACATCACATCAGGATTCCT | 41.40633262 | 37.5509299 |
| 342 | | CTAGACTCTGCGGTATTGTG | 48.56267424 | 41.5330827 |
| 345 | gRNA#003 | CACCACGAGTCTAGACTCTG | 44.43853541 | 40.8553881 |
| 343 | | TACCGCAGAGTCTAGACTCG | 49.18078863 | 56.151898 |
| 344 | | CGCAGAGTCTAGACTCGTGG | 52.41583101 | 57.2264647 |
| 346 | | TGGACTTCTCTCAATTTTCT | 49.58564481 | 51.1350719 |
| 347 | | GGACTTCTCTCAATTTTCTA | 76.16671739 | 79.1684976 |
| 348 | | GACTTCTCTCAATTTTCTAG | 49.79317156 | 54.1540479 |
| 349 | | ACTTCTCTCAATTTTCTAGG | 69.66968253 | 77.4650531 |
| 350 | | CGAATTTTGGCCAAGACACA | 53.53282063 | 54.0024954 |
| 371 | gRNA#004 | CACAGAAAGGCCTTGTAAGT | 42.35590319 | 41.6928086 |
| 370 | | CACTTTCTCGCCAACTTACA | 53.25960148 | 55.120666 |
| 373 | gRNA#005 | GGGCAACGGGGTAAAGGTTC | 36.54111842 | 42.8120918 |
| 375 | gRNA#006 | GTTGCCGGGCAACGGGGTAA | 41.20322042 | 38.1885911 |
| 377 | | CTGGCCGTTGCCGGGCAACG | 57.27834882 | 60.830473 |
| 372 | | TGAACCTTTACCCCGTTGCC | 48.16509881 | 60.952804 |
| 378 | | CCTGGCCGTTGCCGGGCAAC | 56.34234102 | 65.50842 |
| 379 | | ACCTGGCCGTTGCCGGGCAA | 54.10829257 | 53.324749 |
| 374 | | TTTACCCCGTTGCCCGGCAA | 56.72089131 | 62.6906255 |
| 380 | | GCACAGACCTGGCCGTTGCC | 42.46818432 | 47.3720079 |
| 381 | | GGCACAGACCTGGCCGTTGC | 72.65381719 | 77.2400091 |
| 376 | | CCCGTTGCCCGGCAACGGCC | 50.93018919 | 61.086777 |
| 382 | | GCAAACACTTGGCACAGACC | 57.0196485 | 69.491449 |
| 383 | | GGGTTGCGTCAGCAAACACT | 49.73518831 | 54.7510029 |
| 384 | | TTTGCTGACGCAACCCCCAC | 41.79724731 | 50.0362297 |
| 385 | | CTGACGCAACCCCCACTGGC | 36.90727137 | 36.8247762 |
| 386 | | TGACGCAACCCCCACTGGCT | 46.49501492 | 59.6959921 |
| 387 | | GACGCAACCCCCACTGGCTG | 40.09200943 | 51.4756937 |
| 388 | | AACCCCCACTGGCTGGGGCT | 61.82883278 | 79.8761795 |
| 390 | gRNA#007 | TCCGCAGTATGGATCGGCAG | 26.33655968 | 33.7255842 |
| 391 | gRNA#008 | AGGAGTTCCGCAGTATGGAT | 28.49512897 | 40.080391 |
| 389 | gRNA#009 | TCCTCTGCCGATCCATACTG | 28.45399116 | 42.735093 |
| 392 | | CGGCTAGGAGTTCCGCAGTA | 56.5241517 | 66.9060644 |
| 393 | gRNA#010 | TGCGAGCAAAACAAGCGGCT | 41.5479747 | 40.5350018 |
| 395 | | CCTGCTGCGAGCAAAACAAG | 36.4525077 | 50.516964 |
| 394 | | CCGCTTGTTTTGCTCGCAGC | 108.4014077 | 90.5082399 |
| 396 | | TGTTTTGCTCGCAGCAGGTC | 68.78508191 | 75.7537996 |
| 397 | | GCAGCACAGCCTAGCAGCCA | 78.73231487 | 68.3785588 |
| 398 | | TGCTAGGCTGTGCTGCCAAC | 59.52249922 | 69.0333267 |
| 401 | | CGTCCCGCGCAGGATCCAGT | 52.51634701 | 49.5876502 |
| 399 | | GCTGCCAACTGGATCCTGCG | 75.81794218 | 89.0162904 |
| 400 | | CTGCCAACTGGATCCTGCGC | 77.79441236 | 73.9461516 |
| 402 | | AAACAAAGGACGTCCCGCGC | 67.52500576 | 72.6685954 |
| 404 | | CGCCGACGGGACGTAAACAA | 77.77475148 | 70.288774 |
| 403 | | GTCCTTTGTTTACGTCCCGT | 94.99070926 | 103.867949 |
| 406 | | AGGTGCGCCCCGTGGTCGGT | 68.80565242 | 65.4335257 |
| 407 | | AGAGAGGTGCGCCCCGTGGT | 42.18514493 | 55.1199635 |
| 408 | | GTAAAGAGAGGTGCGCCCCG | 53.39922155 | 55.7151401 |
| 410 | | CGGGGAGTCCGCGTAAAGAG | 52.63946411 | 66.9249801 |
| 409 | | GGGGCGCACCTCTCTTTACG | 72.81702761 | 66.4993545 |
| 411 | gRNA#011 | CAGATGAGAAGGCACAGACG | 32.31425506 | 44.762352 |
| 413 | | GGCAGATGAGAAGGCACAGA | 59.89738685 | 59.5785052 |
| 415 | | ACACGGTCCGGCAGATGAGA | 41.29188182 | 52.515655 |
| 412 | | GTCTGTGCCTTCTCATCTGC | 70.71073836 | 72.0049046 |
| 416 | | GAAGCGAAGTGCACACGGTC | 31.51588976 | 59.2847924 |
| 417 | | GAGGTGAAGCGAAGTGCACA | 53.23795933 | 54.7085711 |
| 419 | | GGTCTCCATGCGACGTGCAG | 98.80315853 | 94.871871 |
| 418 | | CTTCACCTCTGCACGTCGCA | 76.66072308 | 76.4195077 |
| 421 | | GTCCTCTTATGTAAGACCTT | 50.06169791 | 63.8903663 |
| 422 | | AGTCCTCTTATGTAAGACCT | 54.84793515 | 62.0058784 |
| 420 | | TGCCCAAGGTCTTACATAAG | 65.64906417 | 79.7359246 |
| 423 | | GTCTTACATAAGAGGACTCT | 65.0201597 | 62.5458243 |
| 424 | | AATGTCAACGACCGACCTTG | 53.64938718 | 65.5805852 |
| 425 | | TTTGAAGTATGCCTCAAGGT | 68.9199506 | 80.763234 |
| 426 | gRNA#012 | AGTCTTTGAAGTATGCCTCA | 30.45840615 | 47.6679105 |
| 427 | | AAGACTGTTTGTTTAAAGAC | 75.19137394 | 74.1370789 |
| 428 | | AGACTGTTTGTTTAAAGACT | 66.21290133 | 75.2309845 |
| 429 | | CTGTTTGTTTAAAGACTGGG | 63.52924235 | 72.0972239 |
| 430 | | GTTTAAAGACTGGGAGGAGT | 52.01423199 | 66.8961386 |
| 431 | | TCTTTGTACTAGGAGGCTGT | 51.48581844 | 68.9533809 |
| 432 | | AGGAGGCTGTAGGCATAAAT | 37.69681736 | 56.2655965 |
| 433 | | GTGAAAAAGTTGCATGGTGC | 82.88524703 | 98.0043703 |
| 434 | | GCAGAGGTGAAAAAGTTGCA | 31.73533955 | 53.6210823 |
| 435 | gRNA#013 | AACAAGAGATGATTAGGCAG | 30.51551968 | 43.8402184 |
| 436 | gRNA#014 | GACATGAACAAGAGATGATT | 15.37394867 | 25.9017005 |
| 437 | | AGCTTGGAGGCTTGAACAGT | 84.06388656 | 100.433196 |
| 441 | gRNA#015 | CCACCCAAGGCACAGCTTGG | 22.57628478 | 29.4502561 |
| 443 | | AAGCCACCCAAGGCACAGCT | 38.69686132 | 57.447646 |
| 438 | | CAAGCCTCCAAGCTGTGCCT | 57.03790348 | 55.3144232 |
| 439 | | AAGCCTCCAAGCTGTGCCTT | 101.2197916 | 108.433992 |
| 442 | | AGCTGTGCCTTGGGTGGCTT | 62.50798441 | 75.5245296 |
| 444 | | GCTGTGCCTTGGGTGGCTTT | 63.60985011 | 68.2127614 |
| 445 | | CTGTGCCTTGGGTGGCTTTG | 58.80930094 | 60.2093595 |
| 446 | | TAGCTCCAAATTCTTTATAA | 81.50792369 | 102.062484 |
| 447 | | GTAGCTCCAAATTCTTTATA | 57.5300482 | 84.4089935 |
| 448 | | TAAAGAATTTGGAGCTACTG | 55.34840957 | 67.1682598 |
| 449 | | ATGACTCTAGCTACCTGGGT | 70.72899714 | 69.314819 |
| 450 | | CACATTTCTTGTCTCACTTT | 135.7647935 | 119.430868 |
| 451 | | TAGTTTCCGGAAGTGTTGAT | 52.38647155 | 59.8621336 |
| 452 | | CGTCTAACAACAGTAGTTTC | 84.81350809 | 79.1119745 |
| 453 | | ACTACTGTTGTTAGACGACG | 50.34753433 | 57.5139945 |
| 454 | | CTGTTGTTAGACGACGAGGC | 47.03375963 | 53.0434947 |
| 455 | | CGAGGGAGTTCTTCTTCTAG | 36.81318989 | 50.1844755 |
| 456 | | GCGAGGGAGTTCTTCTTCTA | 68.04429109 | 71.2738682 |
| 457 | gRNA#016 | GGCGAGGGAGTTCTTCTTCT | 35.40374342 | 49.4263836 |
| 459 | | GACCTTCGTCTGCGAGGCGA | 28.35732375 | 53.108582 |
| 460 | | AGACCTTCGTCTGCGAGGCG | 41.45363172 | 58.2048965 |
| 461 | | GATTGAGACCTTCGTCTGCG | 63.13599738 | 73.3793991 |
| 458 | | CTCCCTCGCCTCGCAGACGA | 41.73812486 | 56.4066766 |
| 462 | | GATTGAGATCTTCTGCGACG | 134.1434937 | 133.039909 |
| 463 | | GTCGCAGAAGATCTCAATCT | 44.87633493 | 58.0732445 |
| 464 | | TCGCAGAAGATCTCAATCTC | 70.59684886 | 75.0458487 |
| 465 | gRNA#017 | ATATGGTGACCCACAAAATG | 41.36374656 | 46.043276 |
| 466 | | TTTGTGGGTCACCATATTCT | 66.33644682 | 65.6466534 |
| 467 | gRNA#018 | TTGTGGGTCACCATATTCTT | 48.06595023 | 41.7714626 |
| 468 | | GCTGGATCCAACTGGTGGTC | 65.83430344 | 69.3357339 |
| 469 | | CACCCCAAAAGGCCTCCGTG | 21.63462413 | 23.5507547 |
| 471 | gRNA#019 | CCTGAGGGCTCCACCCCAAA | 45.40727826 | 44.6869573 |
| 470 | | CCTTTTGGGGTGGAGCCCTC | 50.06807456 | 31.73417 |
| 472 | | GGGGTGGAGCCCTCAGGCTC | 64.29444481 | 64.1755302 |
| 473 | | GGGTGGAGCCCTCAGGCTCA | 44.19826805 | 53.1051257 |
| 474 | | CGATTGGTGGAGGCAGGAGG | 65.52555289 | 60.9306557 |
| 475 | gRNA#020 | CTCATCCTCAGGCCATGCAG | 35.40063237 | 17.5286587 |

[0266] In vitro silencing was observed in an HepG2-NTCP infection model with gRNAs targeting CpG islands with ETRs (FIG. 5A-FIG. 5B). A primary screen was conducted using LNPs of quality within expected parameters and a pilot experiment with a single guide (FIG. 6-FIG. 8). Results demonstrated that 48 gRNAs showed less than 50% expression of HBeAg at day 6 compared to non-targeting control (FIG. 9) and 28 gRNAs showed less than 50% expression of HBsAg at day 6 compared to non-targeting control (FIG. 10). HBsAg and HBeAg expression was positively correlated as shown in FIG. 11.

### Example 4: Zinc Finger Repressors for Silencing HBV

[0267] Zinc finger repressors targeting epigenetic target sites identified in the HBV genome were designed. Table 1 above provides amino acid sequences of zinc finger and its corresponding motif sequences and target sequences of the zinc finger.

[0268] Zinc finger repressors described in Table 1 are tested in an HBV infection model, e.g., in HepG2 cells as described herein, and efficient repression of HBV is confirmed for the zinc finger repressors provided in Table 1.

### Example 5: Further In Vitro Evaluation of gRNAs

[0269] A CRISPR-Off single construct encoding PLA002, consisting of KRAB, DNMT3A, DNMT3L, and dCas9, was used in combination with one or more of the designed sgRNAs for the in vitro assays described in this example.

[0270] HepG2-NTCP cells were infected with HBV for 4 days, following procedures similar as those in Example 3, and were then transfected with CRISPR-off construct and individual exemplary gRNAs (as indicated in Table 13) formulated in a research-grade LNP. At Day 6 post-transfection HBsAg and HBeAg protein expression in the supernatant was evaluated by ELISA, as depicted in FIG. 12A. Results from this experiment are shown in FIG. 12B. All of the tested gRNAs led to reduction of HBsAg and HBeAg levels in the supernatant. Positive control used in this experiment is a gRNA against HBV genome that was previously shown to reduce antigens ˜50%.

[0271] In another experiment, the integrated HBV cell line, PLC/PRF/5, was used to evaluate activity of gRNAs. The PLC/PRF/5 cells were transfected with CRISPR-off (PLA002) and individual gRNAs using a commercial lipid-based transfection reagent. As depicted in FIG. 13A, four days after transfection HBsAg protein expression in the supernatant was evaluated by ELISA. Results from this experiment are shown in FIG. 13B. Target conservation was evaluated in silico and target conservation was defined as 100% gRNA-DNA match.

[0272] In a further experiment, primary human hepatocytes (PHH) derived from humanized mice were infected with HBV for 4 days and then transfected with CRISPR-off (PLA002) and individual gRNAs formulated in a research-grade LNP, GenVoy LNPs. As depicted in FIG. 14A, at Day 6 post-infection HBsAg and HBeAg protein expression in the supernatant was evaluated by ELISA. Results from this experiment are shown in FIG. 14B. Positive control used in this experiment is a HBV gRNA that was previously shown to reduce antigens ˜50%. The data suggested strong in vitro silencing by certain gRNAs at Day 6 after transfection. In a second PHH experiment, depicted in FIG. 14C, post-infection HBsAg and HBeAg protein expression in the supernatant was evaluated by ELISA at Day 12 after delivery of 100 ng of payload (1:1 effector to guide RNA ratio) in research-grade LNPs. Epigenetic editors repress HBsAg and HBeAg secretion in HBV infected PHH cells at this time point, as well. Results are shown in FIG. 14D.

[0273] Sequences of the exemplary gRNAs that were tested in this example are listed in Table 13.

### Example 6: Evaluation of ZFP in HepG2-NTCP Cells

[0274] In this example, ZF-off single constructs encoding a fusion protein consisting of KRAB, DNMT3A, DNMT3L, and an exemplary zinc finger motif of choice, were tested. Sequences of the exemplary zinc fingers that were tested in this example are listed in Table 20, as are sequences for plasmids yielding a subset of the ZF-off single construct fusion proteins.

[0275] Certain exemplary ZF-off constructs were formulated in a research-grade LNP. HepG2-NTCP cells were infected with HBV for 4 days and then transfected with the ZF-off loaded LNPs. As depicted in FIG. 15A, at Day 6 post-infection HBsAg and HBeAg protein expression in the supernatant was evaluated by ELISA. FIG. 15B shows the results as measured by percentage reduction in HBV antigens as compared to non-targeting control. Positive control used in this experiment is a HBV gRNA previously shown to reduce antigens ˜50%. FIG. 16A shows the results of the top ten ZF-off constructs that lead to the most reduction in HBV antigens. FIG. 16B shows the results for all constructs in the screen.

[0276] Table 16 and 17 below show the raw data from these experiments, listed with the mRNA number yielding the zinc finger motif

TABLE 16
% HBsAg expression relative to non-targeting control

| Trial# | 1 | 2 | 3 | 4 | 5 | 6 | 7 | 8 |
|---|---|---|---|---|---|---|---|---|
| Non-targ control | 100 | 100 | 100 | 100 | | | | |
| Pos control | 54 | 59 | 68 | 61 | 75 | 79 | 65 | 86 |
| mRNA0001 | 10 | 19 | 25 | 23 | | | | |
| mRNA0002 | 12 | 2 | 8 | 12 | | | | |
| mRNA0003 | 10 | 11 | 14 | 15 | | | | |
| mRNA0004 | 10 | 28 | 13 | 39 | | | | |
| mRNA0005 | 3 | 5 | 1 | 8 | | | | |
| mRNA0006 | 4 | 12 | 8 | 19 | | | | |
| mRNA0007 | 97 | 86 | 60 | 66 | | | | |
| mRNA0008 | 68 | 69 | 65 | 64 | | | | |
| mRNA0009 | 65 | 67 | 74 | 98 | | | | |
| mRNA0010 | 84 | 69 | 66 | 73 | | | | |
| mRNA0011 | 67 | 50 | 60 | 59 | | | | |
| mRNA0012 | 59 | 61 | 70 | 92 | | | | |
| mRNA0013 | 97 | 70 | 66 | 71 | | | | |
| mRNA0014 | 60 | 81 | 66 | 74 | | | | |
| mRNA0015 | 81 | 73 | 77 | 129 | | | | |
| mRNA0016 | 120 | 78 | 71 | 77 | | | | |
| mRNA0017 | 75 | 77 | 82 | 82 | | | | |
| mRNA0018 | 78 | 84 | 93 | 131 | | | | |
| mRNA0019 | 107 | 107 | 77 | 100 | | | | |
| mRNA0020 | 77 | 99 | 60 | 116 | | | | |
| mRNA0021 | 32 | 49 | 68 | 66 | | | | |
| mRNA0022 | 71 | 66 | 51 | 56 | | | | |
| mRNA0023 | 65 | 71 | 76 | 41 | | | | |
| mRNA0024 | 109 | 89 | 86 | 92 | | | | |
| mRNA0025 | 86 | 92 | 90 | 82 | | | | |
| mRNA0026 | 77 | 88 | 81 | 104 | | | | |
| mRNA0027 | 128 | 77 | 80 | 81 | | | | |
| mRNA0028 | 71 | 67 | 59 | 66 | | | | |
| mRNA0029 | 48 | 47 | 40 | 57 | | | | |
| mRNA0030 | 109 | 82 | 76 | 75 | | | | |
| mRNA0031 | 46 | 32 | 41 | 27 | | | | |
| mRNA0032 | 50 | 59 | 52 | 73 | | | | |
| mRNA0033 | 61 | 62 | 46 | 50 | | | | |
| mRNA0034 | 51 | 24 | 41 | 25 | | | | |
| mRNA0035 | 30 | 25 | 24 | 34 | | | | |
| mRNA0036 | 16 | 22 | 19 | 19 | | | | |
| mRNA0037 | 54 | 43 | 42 | 46 | | | | |
| mRNA0038 | 19 | 23 | 13 | 29 | | | | |
| mRNA0039 | 28 | 46 | 37 | 36 | | | | |
| mRNA0040 | 88 | 78 | 83 | 80 | | | | |
| mRNA0041 | 103 | 92 | 100 | | | | | |
| mRNA0042 | 99 | 91 | 99 | | | | | |
| mRNA0043 | 93 | 89 | 97 | | | | | |
| mRNA0044 | 98 | 100 | 95 | | | | | |
| mRNA0045 | 100 | 96 | 95 | | | | | |
| mRNA0046 | 94 | 83 | 92 | | | | | |
| mRNA0047 | 97 | 77 | 99 | | | | | |
| mRNA0048 | 96 | 94 | 90 | | | | | |
| mRNA0049 | 88 | 87 | 89 | | | | | |
| mRNA0050 | 87 | 87 | 85 | | | | | |
| mRNA0051 | 106 | 104 | 114 | | | | | |
| mRNA0052 | 104 | 101 | 107 | | | | | |
| mRNA0053 | 88 | 86 | 92 | | | | | |
| mRNA0054 | 98 | 102 | 91 | | | | | |
| mRNA0055 | 101 | 96 | 100 | | | | | |
| mRNA0056 | 99 | 107 | 108 | | | | | |
| mRNA0057 | 101 | 102 | 104 | | | | | |
| mRNA0058 | 110 | 104 | 102 | | | | | |
| mRNA0059 | 100 | 91 | 98 | | | | | |
| mRNA0060 | 94 | 103 | 100 | | | | | |
| mRNA0061 | 104 | 96 | 103 | | | | | |
| mRNA0062 | 106 | 98 | 104 | | | | | |
| mRNA0063 | 96 | 86 | 99 | | | | | |

TABLE 17
% HBeAg expression relative to non-targeting control

| Trial# | 100 | 100 | 100 | 100 | | | | |
|---|---|---|---|---|---|---|---|---|
| Non-targ control | 100 | 100 | 100 | 100 | | | | |
| Pos control | 26 | 36 | 41 | 53 | 43 | 43 | 34 | 54 |
| mRNA0001 | 12 | 19 | 22 | 23 | | | | |
| mRNA0002 | 15 | 8 | 17 | 20 | | | | |
| mRNA0003 | 11 | 9 | 13 | 12 | | | | |
| mRNA0004 | 10 | 17 | 9 | 27 | | | | |
| mRNA0005 | 1 | 1 | −1 | 3 | | | | |
| mRNA0006 | 5 | 8 | 7 | 13 | | | | |
| mRNA0007 | 95 | 78 | 59 | 65 | | | | |
| mRNA0008 | 64 | 67 | 60 | 65 | | | | |
| mRNA0009 | 65 | 64 | 81 | 98 | | | | |
| mRNA0010 | 84 | 68 | 69 | 70 | | | | |
| mRNA0011 | 65 | 51 | 51 | 67 | | | | |
| mRNA0012 | 64 | 61 | 74 | 96 | | | | |
| mRNA0013 | 92 | 74 | 73 | 79 | | | | |
| mRNA0014 | 58 | 85 | 58 | 76 | | | | |
| mRNA0015 | 82 | 83 | 78 | 124 | | | | |
| mRNA0016 | 108 | 81 | 72 | 80 | | | | |
| mRNA0017 | 72 | 77 | 72 | 80 | | | | |
| mRNA0018 | 55 | 55 | 71 | 93 | | | | |
| mRNA0019 | 71 | 79 | 51 | 87 | | | | |
| mRNA0020 | 34 | 36 | 32 | 52 | | | | |
| mRNA0021 | 32 | 40 | 55 | 55 | | | | |
| mRNA0022 | 77 | 64 | 53 | 65 | | | | |
| mRNA0023 | 60 | 69 | 72 | 43 | | | | |
| mRNA0024 | 98 | 76 | 87 | 84 | | | | |
| mRNA0025 | 91 | 86 | 82 | 92 | | | | |
| mRNA0026 | 78 | 97 | 87 | 102 | | | | |
| mRNA0027 | 117 | 62 | 68 | 74 | | | | |
| mRNA0028 | 75 | 59 | 58 | 71 | | | | |
| mRNA0029 | 31 | 32 | 22 | 45 | | | | |
| mRNA0030 | 124 | 86 | 79 | 77 | | | | |
| mRNA0031 | 42 | 23 | 27 | 20 | | | | |
| mRNA0032 | 46 | 57 | 57 | 82 | | | | |
| mRNA0033 | 56 | 51 | 44 | 76 | | | | |
| mRNA0034 | 42 | 21 | 41 | 18 | | | | |
| mRNA0035 | 22 | 22 | 24 | 39 | | | | |
| mRNA0036 | 13 | 17 | 16 | 13 | | | | |
| mRNA0037 | 50 | 35 | 34 | 35 | | | | |
| mRNA0038 | 12 | 16 | 13 | 25 | | | | |
| mRNA0039 | 29 | 45 | 39 | 36 | | | | |
| mRNA0040 | 93 | 73 | 80 | 82 | | | | |
| mRNA0041 | 80 | 63 | 111 | | | | | |
| mRNA0042 | 114 | 94 | 98 | | | | | |
| mRNA0043 | 98 | 91 | 99 | | | | | |
| mRNA0044 | 91 | 115 | 108 | | | | | |
| mRNA0045 | 71 | 55 | 62 | | | | | |
| mRNA0046 | 76 | 66 | 63 | | | | | |
| mRNA0047 | 55 | 55 | 45 | | | | | |
| mRNA0048 | 66 | 63 | 78 | | | | | |
| mRNA0049 | 83 | 59 | 52 | | | | | |
| mRNA0050 | 51 | 55 | 49 | | | | | |
| mRNA0051 | 55 | 49 | 49 | | | | | |
| mRNA0052 | 56 | 57 | 66 | | | | | |
| mRNA0053 | 92 | 60 | 57 | | | | | |
| mRNA0054 | 50 | 55 | 56 | | | | | |
| mRNA0055 | 83 | 88 | 74 | | | | | |
| mRNA0056 | 61 | 69 | 112 | | | | | |
| mRNA0057 | 106 | 73 | 65 | | | | | |
| mRNA0058 | 66 | 65 | 65 | | | | | |
| mRNA0059 | 69 | 66 | 71 | | | | | |
| mRNA0060 | 59 | 94 | 101 | | | | | |
| mRNA0061 | 111 | 81 | 68 | | | | | |
| mRNA0062 | 28 | 33 | 41 | | | | | |
| mRNA0063 | 65 | 55 | 31 | | | | | |

### Example 7. Dose Response Testing of Viral Antigens in HepG2-NTCP Cells

[0277] In this example, top ZF fusion proteins were tested in 5-point dose response assay for HBsAg and HBeAg. The 5 dosage points were 200 ng, 150 ng, 100 ng, 50 ng, and 25 ng. Experimental schematic and results are shown in FIG. 17.

### Example 8. Testing for Durable Repression of HBsAg in HepG2.2.15 Cells

[0278] In this example, top ZF fusion proteins were tested for durable repression of HBsAg. Active ZFPs showed durable silencing through Day 27 with 50 ng total treatment. Experimental schematic and results are shown in FIG. 18.

### Example 9. Testing of Silencing of HBsAg in a Second Model for Int-HBV

[0279] In this example, top ZF fusion proteins were tested for repression of HBsAg in PLC/PRF/5 cells. A subset of the ZFPs silenced HBsAg in this second model. Experimental schematic and results are shown in FIG. 19.

### Example 10. Testing ZF Fusion Proteins and CRISPR-Off with Guide RNAs for Specificity

[0280] In this example, ZF fusion proteins targeting HBV exhibiting significant silencing were profiled for specificity in HepG2-NTCP at day 19. All comparisons were performed against a non-targeting ZFP control. An exemplary result for the ZF fusion protein with mRNA0001 zinc finger motif is shown in FIG. 20A. CRISPR-off with guide RNAs were similarly profiled. HepG2-NTCP cells were transfected with 100 ng of total payload using GenVoy™ LNP at a 1:1 gRNA:effector ratio. Cells were split every 3-4 days and collected at day 15 post-treatment for specificity assessments, including RNA-seq and methylation array. DESeq2 was used to identify differential gene expression. As shown in FIG. 20B, little to no changes were observed above chosen thresholds (absolute[log 2[fold change]]>1 and −log 10[adjusted p-value]>5) as expected for effectors targeting HBV DNA. For methylation array, the Infinium MethylationEPIC v2.0 array was used, and DMRs were identified in silico. EE3, EE4, and EE5 had a result of DMR=0. Results are shown in FIGS. 20C-20D.

### Example 11. Stable HBV Silencing Via Epigenetic Editing in Non-Transgenic Mouse Model of Persistent HBV Infection

[0281] A non-transgenic model of persistent HBV infection (AAV-HBV) in immunocompetent mice was used, which was established by administering an adeno-associated viral vector (AAV) that contains HBV Genotype D DNA into the mice. The administration of the AAV-HBV vector resulted in expression of hepatitis B surface antigen (HBsAg), hepatitis B e antigen (HBeAg), and high levels of serum HBV DNA in the mice.

[0282] The CRISPR-off and ZF-off constructs are tested. Constructs are delivered via IV administration of mRNA/gRNA (CRISPR-Off) or mRNA (ZF-Off) formulated into a lipid nanoparticle (LNP) at 2.5 mg/kg and 0.5 mg/kg for CRISPR-Off and ZF-Off, respectively. Some constructs are formulated in LNP compositions as described in US20220402862A1 and/or US20230203480A1. A subset of the mice are re-dosed at two weeks after the first dose; a second subset are re-dosed at one month after the first dose. The readouts are circulating viral DNA, HBsAg, and HBeAg, tested using mouse plasma at one or more time points (such as 7, 14, 28, and 35 days). A durable and significant reduction in the levels of one or more of HBV DNA, HBsAg, and HBeAg is observed for some constructs.

[0283] Longer-term durability is tested over three to six months using the HBV DNA, HBsAg, and HBeAg markers. Progressive and durable reduction in one or more of these markers is seen with delivery of some constructs. The mice are sacrificed and livers are collected for further analysis, and durable silencing is confirmed by at least 2 log reduction of HBsAg and HBV DNA.

### Example 12: Stable HBV Silencing Via Epigenetic Editing in Transgenic Mice Expressing Viral HBV DNA

[0284] A transgenic mouse model of persistent HBV infection (Tg-HBV) was used, whose genome was engineered to integrate HBV Genotype A DNA, resulting in expression of HBsAg and HBeAg, and circulating viral DNA in the mice.

[0285] The CRISPR-off and ZF-off constructs are tested. Constructs are delivered via IV administration of mRNA/gRNA (CRISPR-Off) or mRNA (ZF-Off) formulated into LNP at 2.5 mg/kg and 0.5 mg/kg for CRISPR-Off and ZF-Off, respectively. Some constructs are formulated in LNP compositions as described in US20220402862A1 and/or US20230203480A1. A subset of the mice are re-dosed at two weeks after the first dose; a second subset are re-dosed at one month after the first dose. The readouts are circulating viral DNA, HBsAg, and HBeAg, tested using mouse plasma at one or more time points (such as 7, 14, 28, and 35 days). A durable and significant reduction in the levels of one or more of HBV DNA, HBsAg, and HBeAg is observed for some constructs.

[0286] Longer-term durability is tested over three to six months using the HBV DNA, HBsAg, and HBeAg markers. Progressive and durable reduction in one or more of these markers is seen with delivery of some constructs. The mice are sacrificed and livers are collected for further analysis, and durable silencing is confirmed by at least 2 log reduction of HBsAg and HBV DNA.

### Example 13. CRISPR-Off Guide RNA Multiplexing Study in AAV-HBV and Tg-HBV Mouse Models

[0287] AAV-HBV and Tg-HBV mice are injected with a single administration of one, two, or three guide RNAs with a CRISPR-Off fusion protein in LNPs at 1.5 mg/kg in accordance with Table 18. Samples are included with CRISPR-Off from each of PLA002 and PLA003. HBV DNA, HBsAg, and HBeAg are assayed in plasma at one or more time points, and the mouse liver is collected for further analysis. Durable silencing is confirmed by at least 2 log reduction of HBsAg and HBV DNA.

TABLE 18
CRISPR-Off Multiplexing sample groups

| Group | Guide RNA 1 | Guide RNA 2 | Guide RNA 3 |
|---|---|---|---|
| 1 | gRNA#008 | gRNA#011 | — |
| 2 | gRNA#008 | gRNA#003 | — |
| 3 | gRNA#008 | gRNA#015 | — |
| 4 | gRNA#008 | gRNA#011 | gRNA#015 |
| 5 | gRNA#008 | gRNA#011 | gRNA#003 |
| 6 | gRNA#008 | — | — |
| 7 | Vehicle | — | — |

### Example 14. Zinc Finger Protein Multiplexing Study in AAV-HBV and Tg-HBV Mouse Models

[0288] AAV-HBV and Tg-HBV mice are injected with a single administration at 0.5 mg/kg of one, two, or three ZF fusion proteins in LNPs (schematic, FIG. 21) in accordance with Table 19. HBV DNA, HBsAg, and HBeAg are assayed in plasma at one or more time points, and the mouse liver is collected for further analysis. Durable silencing is confirmed by at least 2 log reduction of HBsAg and HBV DNA.

TABLE 19
ZFP Multiplexing sample groups.

| Group | ZF_Off-1 | ZF_Off-2 | ZF_Off-3 |
|---|---|---|---|
| 1 | mRNA0004 | mRNA0021 | — |
| 2 | mRNA0004 | mRNA0003 | — |
| 3 | mRNA0004 | mRNA0038 | — |
| 4 | mRNA0004 | mRNA0021 | mRNA0003 |
| 5 | mRNA0004 | mRNA0038 | mRNA0003 |
| 6 | mRNA0004 | mRNA0021 | mRNA0038 |
| 7 | mRNA0004 | mRNA0001 | — |
| 8 | mRNA0004 | mRNA0039 | — |
| 9 | mRNA0004 | — | — |
| 10 | Vehicle | — | — |

### SEQUENCES

[0289] The SEQ ID NOs (SEQ) of nucleotide (nt) and amino acid (aa) sequences described in the present disclosure are listed in Table 20 below.

TABLE 20
Sequence listing.

| SEQ | Description | Sequence |
|---|---|---|
| 1 | S. pyogenes WT | ATGGATAAGAAATACTCAATAGGCTTAGATATCGGCACAAATAGCGTCGGATGGGCGGTG |
| | Cas9 Sequence | ATCACTGATGAATATAAGGTTCCGTCTAAAAAGTTCAAGGTTCTGGGAAATACAGACCGC |
| | (nt) | CACAGTATCAAAAAAAATCTTATAGGGGCTCTTTTATTTGACAGTGGAGAGACAGCGGAA |
| | | GCGACTCGTCTCAAACGGACAGCTCGTAGAAGGTATACACGTCGGAAGAATCGTATTTGT |
| | | TATCTACAGGAGATTTTTTCAAATGAGATGGCGAAAGTAGATGATAGTTTCTTTCATCGA |
| | | CTTGAAGAGTCTTTTTTGGTGGAAGAAGACAAGAAGCATGAACGTCATCCTATTTTTGGA |
| | | AATATAGTAGATGAAGTTGCTTATCATGAGAAATATCCAACTATCTATCATCTGCGAAAA |
| | | AAATTGGTAGATTCTACTGATAAAGCGGATTTGCGCTTAATCTATTTGGCCTTAGCGCAT |
| | | ATGATTAAGTTTCGTGGTCATTTTTTGATTGAGGGAGATTTAAATCCTGATAATAGTGAT |
| | | GTGGACAAACTATTTATCCAGTTGGTACAAACCTACAATCAATTATTTGAAGAAAACCCT |
| | | ATTAACGCAAGTGGAGTAGATGCTAAAGCGATTCTTTCTGCACGATTGAGTAAATCAAGA |
| | | CGATTAGAAAATCTCATTGCTCAGCTCCCCGGTGAGAAGAAAAATGGCTTATTTGGGAAT |
| | | CTCATTGCTTTGTCATTGGGTTTGACCCCTAATTTTAAATCAAATTTTGATTTGGCAGAA |
| | | GATGCTAAATTACAGCTTTCAAAAGATACTTACGATGATGATTTAGATAATTTATTGGCG |
| | | CAAATTGGAGATCAATATGCTGATTTGTTTTTGGCAGCTAAGAATTTATCAGATGCTATT |
| | | TTACTTTCAGATATCCTAAGAGTAAATACTGAAATAACTAAGGCTCCCCTATCAGCTTCA |
| | | ATGATTAAACGCTACGATGAACATCATCAAGACTTGACTCTTTTAAAAGCTTTAGTTCGA |
| | | CAACAACTTCCAGAAAAGTATAAAGAAATCTTTTTTGATCAATCAAAAAACGGATATGCA |
| | | GGTTATATTGATGGGGGAGCTAGCCAAGAAGAATTTTATAAATTTATCAAACCAATTTTA |
| | | GAAAAAATGGATGGTACTGAGGAATTATTGGTGAAACTAAATCGTGAAGATTTGCTGCGC |
| | | AAGCAACGGACCTTTGACAACGGCTCTATTCCCCATCAAATTCACTTGGGTGAGCTGCAT |
| | | GCTATTTTGAGAAGACAAGAAGACTTTTATCCATTTTTAAAAGACAATCGTGAGAAGATT |
| | | GAAAAAATCTTGACTTTTCGAATTCCTTATTATGTTGGTCCATTGGCGCGTGGCAATAGT |
| | | CGTTTTGCATGGATGACTCGGAAGTCTGAAGAAACAATTACCCCATGGAATTTTGAAGAA |
| | | GTTGTCGATAAAGGTGCTTCAGCTCAATCATTTATTGAACGCATGACAAACTTTGATAAA |
| | | AATCTTCCAAATGAAAAAGTACTACCAAAACATAGTTTGCTTTATGAGTATTTTACGGTT |
| | | TATAACGAATTGACAAAGGTCAAATATGTTACTGAAGGAATGCGAAAACCAGCATTTCTT |
| | | TCAGGTGAACAGAAGAAAGCCATTGTTGATTTACTCTTCAAAACAAATCGAAAAGTAACC |
| | | GTTAAGCAATTAAAAGAAGATTATTTCAAAAAAATAGAATGTTTTGATAGTGTTGAAATT |
| | | TCAGGAGTTGAAGATAGATTTAATGCTTCATTAGGTACCTACCATGATTTGCTAAAAATT |
| | | ATTAAAGATAAAGATTTTTTGGATAATGAAGAAAATGAAGATATCTTAGAGGATATTGTT |
| | | TTAACATTGACCTTATTTGAAGATAGGGAGATGATTGAGGAAAGACTTAAAACATATGCT |
| | | CACCTCTTTGATGATAAGGTGATGAAACAGCTTAAACGTCGCCGTTATACTGGTTGGGGA |
| | | CGTTTGTCTCGAAAATTGATTAATGGTATTAGGGATAAGCAATCTGGCAAAACAATATTA |
| | | GATTTTTTGAAATCAGATGGTTTTGCCAATCGCAATTTTATGCAGCTGATCCATGATGAT |
| | | AGTTTGACATTTAAAGAAGACATTCAAAAAGCACAAGTGTCTGGACAAGGCGATAGTTTA |
| | | CATGAACATATTGCAAATTTAGCTGGTAGCCCTGCTATTAAAAAAGGTATTTTACAGACT |
| | | GTAAAAGTTGTTGATGAATTGGTCAAAGTAATGGGGCGGCATAAGCCAGAAAATATCGTT |
| | | ATTGAAATGGCACGTGAAAATCAGACAACTCAAAAGGGCCAGAAAAATTCGCGAGAGCGT |
| | | ATGAAACGAATCGAAGAAGGTATCAAAGAATTAGGAAGTCAGATTCTTAAAGAGCATCCT |
| | | GTTGAAAATACTCAATTGCAAAATGAAAAGCTCTATCTCTATTATCTCCAAAATGGAAGA |
| | | GACATGTATGTGGACCAAGAATTAGATATTAATCGTTTAAGTGATTATGATGTCGATCAC |
| | | ATTGTTCCACAAAGTTTCCTTAAAGACGATTCAATAGACAATAAGGTCTTAACGCGTTCT |
| | | GATAAAAATCGTGGTAAATCGGATAACGTTCCAAGTGAAGAAGTAGTCAAAAAGATGAAA |
| | | AACTATTGGAGACAACTTCTAAACGCCAAGTTAATCACTCAACGTAAGTTTGATAATTTA |
| | | ACGAAAGCTGAACGTGGAGGTTTGAGTGAACTTGATAAAGCTGGTTTTATCAAACGCCAA |
| | | TTGGTTGAAACTCGCCAAATCACTAAGCATGTGGCACAAATTTTGGATAGTCGCATGAAT |
| | | ACTAAATACGATGAAAATGATAAACTTATTCGAGAGGTTAAAGTGATTACCTTAAAATCT |
| | | AAATTAGTTTCTGACTTCCGAAAAGATTTCCAATTCTATAAAGTACGTGAGATTAACAAT |
| | | TACCATCATGCCCATGATGCGTATCTAAATGCCGTCGTTGGAACTGCTTTGATTAAGAAA |
| | | TATCCAAAACTTGAATCGGAGTTTGTCTATGGTGATTATAAAGTTTATGATGTTCGTAAA |
| | | ATGATTGCTAAGTCTGAGCAAGAAATAGGCAAAGCAACCGCAAAATATTTCTTTTACTCT |
| | | AATATCATGAACTTCTTCAAAACAGAAATTACACTTGCAAATGGAGAGATTCGCAAACGC |
| | | CCTCTAATCGAAACTAATGGGGAAACTGGAGAAATTGTCTGGGATAAAGGGCGAGATTTT |
| | | GCCACAGTGCGCAAAGTATTGTCCATGCCCCAAGTCAATATTGTCAAGAAAACAGAAGTA |
| | | CAGACAGGCGGATTCTCCAAGGAGTCAATTTTACCAAAAAGAAATTCGGACAAGCTTATT |
| | | GCTCGTAAAAAAGACTGGGATCCAAAAAAATATGGTGGTTTTGATAGTCCAACGGTAGCT |
| | | TATTCAGTCCTAGTGGTTGCTAAGGTGGAAAAAGGGAAATCGAAGAAGTTAAAATCCGTT |
| | | AAAGAGTTACTAGGGATCACAATTATGGAAAGAAGTTCCTTTGAAAAAAATCCGATTGAC |
| | | TTTTTAGAAGCTAAAGGATATAAGGAAGTTAAAAAAGACTTAATCATTAAACTACCTAAA |
| | | TATAGTCTTTTTGAGTTAGAAAACGGTCGTAAACGGATGCTGGCTAGTGCCGGAGAATTA |
| | | CAAAAAGGAAATGAGCTGGCTCTGCCAAGCAAATATGTGAATTTTTTATATTTAGCTAGT |
| | | CATTATGAAAAGTTGAAGGGTAGTCCAGAAGATAACGAACAAAAACAATTGTTTGTGGAG |
| | | CAGCATAAGCATTATTTAGATGAGATTATTGAGCAAATCAGTGAATTTTCTAAGCGTGTT |
| | | ATTTTAGCAGATGCCAATTTAGATAAAGTTCTTAGTGCATATAACAAACATAGAGACAAA |
| | | CCAATACGTGAACAAGCAGAAAATATTATTCATTTATTTACGTTGACGAATCTTGGAGCT |
| | | CCCGCTGCTTTTAAATATTTTGATACAACAATTGATCGTAAACGATATACGTCTACAAAA |
| | | GAAGTTTTAGATGCCACTCTTATCCATCAATCCATCACTGGTCTTTATGAAACACGCATT |
| | | GATTTGAGTCAGCTAGGAGGTGACTGA |
| 2 | S. pyogenes WT | MDKKYSIGLDIGTNSVGWAVITDEYKVPSKKFKVLGNTDRHSIKKNLIGALLFDSGETAE |
| | Cas9 Sequence | ATRLKRTARRRYTRRKNRICYLQEIFSNEMAKVDDSFFHRLEESFLVEEDKKHERHPIFG |
| | (aa) | NIVDEVAYHEKYPTIYHLRKKLVDSTDKADLRLIYLALAHMIKFRGHFLIEGDLNPDNSD |
| | | VDKLFIQLVQTYNQLFEENPINASGVDAKAILSARLSKSRRLENLIAQLPGEKKNGLFGN |
| | | LIALSLGLTPNFKSNFDLAEDAKLQLSKDTYDDDLDNLLAQIGDQYADLFLAAKNLSDAI |
| | | LLSDILRVNTEITKAPLSASMIKRYDEHHQDLTLLKALVRQQLPEKYKEIFFDQSKNGYA |
| | | GYIDGGASQEEFYKFIKPILEKMDGTEELLVKLNREDLLRKQRTFDNGSIPHQIHLGELH |
| | | AILRRQEDFYPFLKDNREKIEKILTFRIPYYVGPLARGNSRFAWMTRKSEETITPWNFEE |
| | | VVDKGASAQSFIERMTNFDKNLPNEKVLPKHSLLYEYFTVYNELTKVKYVTEGMRKPAFL |
| | | SGEQKKAIVDLLFKTNRKVTVKQLKEDYFKKIECFDSVEISGVEDRFNASLGTYHDLLKI |
| | | IKDKDFLDNEENEDILEDIVLTLTLFEDREMIEERLKTYAHLFDDKVMKQLKRRRYTGWG |
| | | RLSRKLINGIRDKQSGKTILDFLKSDGFANRNFMQLIHDDSLTFKEDIQKAQVSGQGDSL |
| | | HEHIANLAGSPAIKKGILQTVKVVDELVKVMGRHKPENIVIEMARENQTTQKGQKNSRER |
| | | MKRIEEGIKELGSQILKEHPVENTQLQNEKLYLYYLQNGRDMYVDQELDINRLSDYDVDH |
| | | IVPQSFLKDDSIDNKVLTRSDKNRGKSDNVPSEEVVKKMKNYWRQLLNAKLITQRKFDNL |
| | | TKAERGGLSELDKAGFIKRQLVETRQITKHVAQILDSRMNTKYDENDKLIREVKVITLKS |
| | | KLVSDFRKDFQFYKVREINNYHHAHDAYLNAVVGTALIKKYPKLESEFVYGDYKVYDVRK |
| | | MIAKSEQEIGKATAKYFFYSNIMNFFKTEITLANGEIRKRPLIETNGETGEIVWDKGRDF |
| | | ATVRKVLSMPQVNIVKKTEVQTGGFSKESILPKRNSDKLIARKKDWDPKKYGGFDSPTVA |
| | | YSVLVVAKVEKGKSKKLKSVKELLGITIMERSSFEKNPIDFLEAKGYKEVKKDLIIKLPK |
| | | YSLFELENGRKRMLASAGELQKGNELALPSKYVNFLYLASHYEKLKGSPEDNEQKQLFVE |
| | | QHKHYLDEIIEQISEFSKRVILADANLDKVLSAYNKHRDKPIREQAENIIHLFTLTNLGA |
| | | PAAFKYFDTTIDRKRYTSTKEVLDATLIHQSITGLYETRIDLSQLGGD |
| 3 | SaCas9 | MKRNYILGLDIGITSVGYGIIDYETRDVIDAGVRLFKEANVENNEGRRSKRGARRLKRRR |
| | | RHRIQRVKKLLFDYNLLTDHSELSGINPYEARVKGLSQKLSEEEFSAALLHLAKRRGVHN |
| | | VNEVEEDTGNELSTKEQISRNSKALEEKYVAELQLERLKKDGEVRGSINRFKTSDYVKEA |
| | | KQLLKVQKAYHQLDQSFIDTYIDLLETRRTYYEGPGEGSPFGWKDIKEWYEMLMGHCTYF |
| | | PEELRSVKYAYNADLYNALNDLNNLVITRDENEKLEYYEKFQIIENVFKQKKKPTLKQIA |
| | | KEILVNEEDIKGYRVTSTGKPEFTNLKVYHDIKDITARKEIIENAELLDQIAKILTIYQS |
| | | SEDIQEELTNLNSELTQEEIEQISNLKGYTGTHNLSLKAINLILDELWHTNDNQIAIFNR |
| | | LKLVPKKVDLSQQKEIPTTLVDDFILSPVVKRSFIQSIKVINAIIKKYGLPNDIIIELAR |
| | | EKNSKDAQKMINEMQKRNRQTNERIEEIIRTTGKENAKYLIEKIKLHDMQEGKCLYSLEA |
| | | IPLEDLLNNPFNYEVDHIIPRSVSFDNSFNNKVLVKQEENSKKGNRTPFQYLSSSDSKIS |
| | | YETFKKHILNLAKGKGRISKTKKEYLLEERDINRFSVQKDFINRNLVDTRYATRGLMNLL |
| | | RSYFRVNNLDVKVKSINGGFTSFLRRKWKFKKERNKGYKHHAEDALIIANADFIFKEWKK |
| | | LDKAKKVMENQMFEEKQAESMPEIETEQEYKEIFITPHQIKHIKDFKDYKYSHRVDKKPN |
| | | RELINDTLYSTRKDDKGNTLIVNNLNGLYDKDNDKLKKLINKSPEKLLMYHHDPQTYQKL |
| | | KLIMEQYGDEKNPLYKYYEETGNYLTKYSKKDNGPVIKKIKYYGNKLNAHLDITDDYPNS |
| | | RNKVVKLSLKPYRFDVYLDNGVYKFVTVKNLDVIKKENYYEVNSKCYEEAKKLKKISNQA |
| | | EFIASFYNNDLIKINGELYRVIGVNNDLLNRIEVNMIDITYREYLENMNDKRPPRIIKTI |
| | | ASKTQSIKKYSTDILGNLYEVKSKKHPQIIKKG |
| 4 | F. novicida WT | MSIYQEFVNKYSLSKTLRFELIPQGKTLENIKARGLILDDEKRAKDYKKAKQIIDKYHQF |
| | Cpf1 | FIEEILSSVCISEDLLQNYSDVYFKLKKSDDDNLQKDFKSAKDTIKKQISEYIKDSEKFK |
| | | NLFNQNLIDAKKGQESDLILWLKQSKDNGIELFKANSDITDIDEALEIIKSFKGWTTYFK |
| | | GFHENRKNVYSSNDIPTSIIYRIVDDNLPKFLENKAKYESLKDKAPEAINYEQIKKDLAE |
| | | ELTFDIDYKTSEVNQRVFSLDEVFEIANFNNYLNQSGITKFNTIIGGKFVNGENTKRKGI |
| | | NEYINLYSQQINDKTLKKYKMSVLFKQILSDTESKSFVIDKLFDDSDVVTTMQSFYEQIA |
| | | AFKTVEEKSIKETLSLLFDDLKAQKLDLSKIYFKNDKSLTDLSQQVFDDYSVIGTAVLEY |
| | | ITQQIAPKNLDNPSKKEQELIAKKTEKAKYLSLETIKLALEEFNKHRDIDKQCRFEEILA |
| | | NFAAIPMIFDEIAQNKDNLAQISIKYQNQGKKDLLQASAEDDVKAIKDLLDQTNNLLHKL |
| | | KIFHISQSEDKANILDKDEHFYLVFEECYFELANIVPLYNKIRNYITQKPYSDEKFKLNF |
| | | ENSTLANGWDKNKEPDNTAILFIKDDKYYLGVMNKKNNKIFDDKAIKENKGEGYKKIVYK |
| | | LLPGANKMLPKVFFSAKSIKFYNPSEDILRIRNHSTHTKNGSPQKGYEKFEFNIEDCRKF |
| | | IDFYKQSISKHPEWKDFGFRFSDTQRYNSIDEFYREVENQGYKLTFENISESYIDSVVNQ |
| | | GKLYLFQIYNKDFSAYSKGRPNLHTLYWKALFDERNLQDVVYKLNGEAELFYRKQSIPKK |
| | | ITHPAKEAIANKNKDNPKKESVFEYDLIKDKRFTEDKFFFHCPITINFKSSGANKFNDEI |
| | | NLLLKEKANDVHILSIDRGERHLAYYTLVDGKGNIIKQDTFNIIGNDRMKTNYHDKLAAI |
| | | EKDRDSARKDWKKINNIKEMKEGYLSQVVHEIAKLVIEYNAIVVFEDLNFGFKRGRFKVE |
| | | KQVYQKLEKMLIEKLNYLVFKDNEFDKTGGVLRAYQLTAPFETFKKMGKQTGIIYYVPAG |
| | | FTSKICPVTGFVNQLYPKYESVSKSQEFFSKFDKICYNLDKGYFEFSFDYKNFGDKAAKG |
| | | KWTIASFGSRLINFRNSDKNHNWDTREVYPTKELEKLLKDYSIEYGHGECIKAAICGESD |
| | | KKFFAKLTSVLNTILQMRNSKTGTELDYLISPVADVNGNFFDSRQAPKNMPQDADANGAY |
| | | HIGLKGLMLLGRIKNNQEGKKLNLVIKNEEYFEFVQNRNN |
| 5 | CasX | MEKRINKIRKKLSADNATKPVSRSGPMKTLLVRVMTDDLKKRLEKRRKKPEVMPQVISNN |
| | | AANNLRMLLDDYTKMKEAILQVYWQEFKDDHVGLMCKFAQPASKKIDQNKLKPEMDEKGN |
| | | LTTAGFACSQCGQPLFVYKLEQVSEKGKAYTNYFGRCNVAEHEKLILLAQLKPEKDSDEA |
| | | VTYSLGKFGQRALDFYSIHVTKESTHPVKPLAQIAGNRYASGPVGKALSDACMGTIASFL |
| | | SKYQDIIIEHQKVVKGNQKRLESLRELAGKENLEYPSVTLPPQPHTKEGVDAYNEVIARV |
| | | RMWVNLNLWQKLKLSRDDAKPLLRLKGFPSFPVVERRENEVDWWNTINEVKKLIDAKRDM |
| | | GRVFWSGVTAEKRNTILEGYNYLPNENDHKKREGSLENPKKPAKRQFGDLLLYLEKKYAG |
| | | DWGKVFDEAWERIDKKIAGLTSHIEREEARNAEDAQSKAVLTDWLRAKASFVLERLKEMD |
| | | EKEFYACEIQLQKWYGDLRGNPFAVEAFNRVVDISGFSIGSDGHSIQYRNLLAWKYLENG |
| | | KREFYLLMNYGKKGRIRFTDGTDIKKSGKWQGLLYGGGKAKVIDLTFDPDDEQLIILPLA |
| | | FGTRQGREFIWNDLLSLETGLIKLANGRVIEKTIYNKKIGRDEPALFVALTFERREVVDP |
| | | SNIKPVNLIGVDRGENIPAVIALTDPEGCPLPEFKDSSGGPTDILRIGEGYKEKQRAIQA |
| | | AKEVEQRRAGGYSRKFASKSRNLADDMVRNSARDLFYHAVTHDAVLVFENLSRGFGRQGK |
| | | RTFMTERQYTKMEDWLTAKLAYEGLTSKTYLSKTLAQYTSKTCSNCGFTITTADYDGMLV |
| | | RLKKTSDGWATTLNNKELKAEGQITYYNRYKRQTVEKELSAELDRLSEESGNNDISKWTK |
| | | GRRDEALFLLKKRFSHRPVQEQFVCLDCGHEVHADEQAALNIARSWLFLNSNSTEFKSYK |
| | | SGKQPFVGAWQAFYKRRLKEVWKPNA |
| 6 | CasY | MRKKLFKGYILHNKRLVYTGKAAIRSIKYPLVAPNKTALNNLSEKIIYDYEHLFGPLNVA |
| | | SYARNSNRYSLVDFWIDSLRAGVIWQSKSTSLIDLISKLEGSKSPSEKIFEQIDFELKNK |
| | | LDKEQFKDIILLNTGIRSSSNVRSLRGRFLKCFKEEFRDTEEVIACVDKWSKDLIVEGKS |
| | | ILVSKQFLYWEEEFGIKIFPHFKDNHDLPKLTFFVEPSLEFSPHLPLANCLERLKKFDIS |
| | | RESLLGLDNNFSAFSNYFNELFNLLSRGEIKKIVTAVLAVSKSWENEPELEKRLHFLSEK |
| | | AKLLGYPKLTSSWADYRMIIGGKIKSWHSNYTEQLIKVREDLKKHQIALDKLQEDLKKVV |
| | | DSSLREQIEAQREALLPLLDTMLKEKDESDDLELYRFILSDFKSLLNGSYQRYIQTEEER |
| | | KEDRDVTKKYKDLYSNLRNIPRFFGESKKEQFNKFINKSLPTIDVGLKILEDIRNALETV |
| | | SVRKPPSITEEYVTKQLEKLSRKYKINAFNSNRFKQITEQVLRKYNNGELPKISEVFYRY |
| | | PRESHVAIRILPVKISNPRKDISYLLDKYQISPDWKNSNPGEVVDLIEIYKLTLGWLLSC |
| | | NKDFSMDFSSYDLKLFPEAASLIKNFGSCLSGYYLSKMIFNCITSEIKGMITLYTRDKFV |
| | | VRYVTQMIGSNQKFPLLCLVGEKQTKNFSRNWGVLIEEKGDLGEEKNQEKCLIFKDKTDF |
| | | AKAKEVEIFKNNIWRIRTSKYQIQFLNRLFKKTKEWDLMNLVLSEPSLVLEEEWGVSWDK |
| | | DKLLPLLKKEKSCEERLYYSLPLNLVPATDYKEQSAEIEQRNTYLGLDVGEFGVAYAVVR |
| | | IVRDRIELLSWGFLKDPALRKIRERVQDMKKKQVMAVFSSSSTAVARVREMAIHSLRNQI |
| | | HSIALAYKAKIIYEISISNFETGGNRMAKIYRSIKVSDVYRESGADTLVSEMIWGKKNKQ |
| | | MGNHISSYATSYTCCNCARTPFELVIDNDKEYEKGGDEFIFNVGDEKKVRGFLQKSLLGK |
| | | TIKGKEVLKSIKEYARPPIREVLLEGEDVEQLLKRRGNSYIYRCPFCGYKTDADIQAALN |
| | | IACRGYISDNAKDAVKEGERKLDYILEVRKLWEKNGAVLRSAKFL |
| 7 | CasPhi | MADTPTLFTQFLRHHLPGQRFRKDILKQAGRILANKGEDATIAFLRGKSEESPPDFQPPV |
| | | KCPIIACSRPLTEWPIYQASVAIQGYVYGQSLAEFEASDPGCSKDGLLGWFDKTGVCTDY |
| | | FSVQGLNLIFQNARKRYIGVQTKVTNRNEKRHKKLKRINAKRIAEGLPELTSDEPESALD |
| | | ETGHLIDPPGLNTNIYCYQQVSPKPLALSEVNQLPTAYAGYSTSGDDPIQPMVTKDRLSI |
| | | SKGQPGYIPEHQRALLSQKKHRRMRGYGLKARALLVIVRIQDDWAVIDLRSLLRNAYWRR |
| | | IVQTKEPSTITKLLKLVTGDPVLDATRMVATFTYKPGIVQVRSAKCLKNKQGSKLFSERY |
| | | LNETVSVTSIDLGSNNLVAVATYRLVNGNTPELLQRFTLPSHLVKDFERYKQAHDTLEDS |
| | | IQKTAVASLPQGQQTEIRMWSMYGFREAQERVCQELGLADGSIPWNVMTATSTILTDLFL |
| | | ARGGDPKKCMFTSEPKKKKNSKQVLYKIRDRAWAKMYRTLLSKETREAWNKALWGLKRGS |
| | | PDYARLSKRKEELARRCVNYTISTAEKRAQCGRTIVALEDLNIGFFHGRGKQEPGWVGLF |
| | | TRKKENRWLMQALHKAFLELAHHRGYHVIEVNPAYTSQTCPVCRHCDPDNRDQHNREAFH |
| | | CIGCGFRGNADLDVATHNIAMVAITGESLKRARGSVASKTPQPLAAE |
| 8 | Cas12f1 | MIKVYRYEIVKPLDLDWKEFGTILRQLQQETRFALNKATQLAWEWMGFSSDYKDNHGEYP |
| | (Cas14a) | KSKDILGYTNVHGYAYHTIKTKAYRLNSGNLSQTIKRATDRFKAYQKEILRGDMSIPSYK |
| | | RDIPLDLIKENISVNRMNHGDYIASLSLLSNPAKQEMNVKRKISVIIIVRGAGKTIMDRI |
| | | LSGEYQVSASQIIHDDRKNKWYLNISYDFEPQTRVLDLNKIMGIDLGVAVAVYMAFQHTP |
| | | ARYKLEGGEIENFRRQVESRRISMLRQGKYAGGARGGHGRDKRIKPIEQLRDKIANFRDT |
| | | TNHRYSRYIVDMAIKEGCGTIQMEDLTNIRDIGSRFLQNWTYYDLQQKIIYKAEEAGIKV |
| | | IKIDPQYTSQRCSECGNIDSGNRIGQAIFKCRACGYEANADYNAARNIAIPNIDKIIAES |
| | | IKSGGS |
| 9 | Cas12f2 | NAMIAQKTIKIKLNPTKEQIIKLNSIIEEYIKVSNFTAKKIAEIQESFTDSGLTQGTCSE |
| | (Cas14b) | CGKEKTYRKYHLLKKDNKLFCITCYKRKYSQFTLQKVEFQNKTGLRNVAKLPKTYYTNAI |
| | | RFASDTFSGFDEIIKKKQNRLNSIQNRLNFWKELLYNPSNRNEIKIKVVKYAPKTDTREH |
| | | PHYYSEAEIKGRIKRLEKQLKKFKMPKYPEFTSETISLQRELYSWKNPDELKISSITDKN |
| | | ESMNYYGKEYLKRYIDLINSQTPQILLEKENNSFYLCFPITKNIEMPKIDDTFEPVGIDW |
| | | GITRNIAVVSILDSKTKKPKFVKFYSAGYILGKRKHYKSLRKHFGQKKRQDKINKLGTKE |
| | | DRFIDSNIHKLAFLIVKEIRNHSNKPIILMENITDNREEAEKSMRQNILLHSVKSRLQNY |
| | | IAYKALWNNIPTNLVKPEHTSQICNRCGHQDRENRPKGSKLFKCVKCNYMSNADENASIN |
| | | IARKFYIGEYEPFYKDNEKMKSGVNSISM |
| 10 | Cas12f3 | MEVQKTVMKTLSLRILRPLYSQEIEKEIKEEEKERRKQAGGTGELDGGFYKKLEKKHSEM |
| | (Cas14c) | FSFDRLNLLLNQLQREIAKVYNHAISELYIATIAQGNKSNKHYISSIVYNRAYGYFYNAY |
| | | IALGICSKVEANFRSNELLTQQSALPTAKSDNFPIVLHKQKGAEGEDGGFRISTEGSDLI |
| | | FEIPIPFYEYNGENRKEPYKWVKKGGQKPVLKLILSTFRRQRNKGWAKDEGTDAEIRKVT |
| | | EGKYQVSQIEINRGKKLGEHQKWFANFSIEQPIYERKPNRSIVGGLDVGIRSPLVCAINN |
| | | SFSRYSVDSNDVFKFSKQVFAFRRRLLSKNSLKRKHGHAAHKLEPITEMTEKNDKFRKKI |
| | | IERWAKEVTNFFVKNQVGIVQIEDLSTMKDREDHFFNQYLRGFWPYYQMQTLIENKLKEY |
| | | GIEVKRVQAKYTSQLCSNPNCRYWNNYFNFEYRKVNKFPKFKCEKCNLEISADYNAARNL |
| | | STPDIEKFVAKATKGINLPEK |
| 11 | C2c8 | MKVLEFKIHPTEEQVSKIDQSLAACKLLWNLSIALKEESKQRYYRKKHKFDEFSPEIWGL |
| | | SYSGHYDEKEFKTLKDKEKKLLIGNPCCKIAYFKKTSNGKEYTPLNSIPIRRFMNAENID |
| | | KDAVNYLNRKKLAFYFRENTAKFIGEIETEFKKGFFKSVIKPAYDAAKKGIRGIPRFKGR |
| | | RDKVETLVNGQPETIKIKSNGVIVSSKIGLLKIRGLDRLQGKAPRMAKITRKATGYYLQL |
| | | TIETDDTIYKESDKCVGLDMGAVAIFTDDLGRQSEAKRYAKIQKKRLNRLQRQASRQKDN |
| | | SNNQRKTYAKLARVHEKIARQRKGRNAQLAHKITSEYQSVILEDLNLKNMTAAAKPKERE |
| | | DGDGYKQNGKKRKSGLNKALLDNAIGQLRTFIENKANERGRKIIRVNPKHTSQTCPNCGN |
| | | IDKANRVSQSKFKCVSCGYEAHADQNAAANILIRGLRDEFLRAIGSLYKFPVSMIGKYPG |
| | | LAGEFTPDLDANQESIGDAPIENAEHSISKQMKQEGNRTPTQPENGSQSLIFLSAPPQPC |
| | | GDSHGTNNPKALPNKASKRSSKKPRGAIPENPDQLTIWDLLD |
| 12 | dSpCas9 | MDKKYSIGLAIGTNSVGWAVITDEYKVPSKKFKVLGNTDRHSIKKNLIGALLFDSGETAE |
| | | ATRLKRTARRRYTRRKNRICYLQEIFSNEMAKVDDSFFHRLEESFLVEEDKKHERHPIFG |
| | | NIVDEVAYHEKYPTIYHLRKKLVDSTDKADLRLIYLALAHMIKFRGHFLIEGDLNPDNSD |
| | | VDKLFIQLVQTYNQLFEENPINASGVDAKAILSARLSKSRRLENLIAQLPGEKKNGLFGN |
| | | LIALSLGLTPNFKSNFDLAEDAKLQLSKDTYDDDLDNLLAQIGDQYADLFLAAKNLSDAI |
| | | LLSDILRVNTEITKAPLSASMIKRYDEHHQDLTLLKALVRQQLPEKYKEIFFDQSKNGYA |
| | | GYIDGGASQEEFYKFIKPILEKMDGTEELLVKLNREDLLRKQRTFDNGSIPHQIHLGELH |
| | | AILRRQEDFYPFLKDNREKIEKILTFRIPYYVGPLARGNSRFAWMTRKSEETITPWNFEE |
| | | VVDKGASAQSFIERMTNFDKNLPNEKVLPKHSLLYEYFTVYNELTKVKYVTEGMRKPAFL |
| | | SGEQKKAIVDLLFKTNRKVTVKQLKEDYFKKIECFDSVEISGVEDRFNASLGTYHDLLKI |
| | | IKDKDFLDNEENEDILEDIVLTLTLFEDREMIEERLKTYAHLFDDKVMKQLKRRRYTGWG |
| | | RLSRKLINGIRDKQSGKTILDFLKSDGFANRNFMQLIHDDSLTFKEDIQKAQVSGQGDSL |
| | | HEHIANLAGSPAIKKGILQTVKVVDELVKVMGRHKPENIVIEMARENQTTQKGQKNSRER |
| | | MKRIEEGIKELGSQILKEHPVENTQLQNEKLYLYYLQNGRDMYVDQELDINRLSDYDVDA |
| | | IVPQSFLKDDSIDNKVLTRSDKNRGKSDNVPSEEVVKKMKNYWRQLLNAKLITQRKFDNL |
| | | TKAERGGLSELDKAGFIKRQLVETRQITKHVAQILDSRMNTKYDENDKLIREVKVITLKS |
| | | KLVSDFRKDFQFYKVREINNYHHAHDAYLNAVVGTALIKKYPKLESEFVYGDYKVYDVRK |
| | | MIAKSEQEIGKATAKYFFYSNIMNFFKTEITLANGEIRKRPLIETNGETGEIVWDKGRDF |
| | | ATVRKVLSMPQVNIVKKTEVQTGGFSKESILPKRNSDKLIARKKDWDPKKYGGFDSPTVA |
| | | YSVLVVAKVEKGKSKKLKSVKELLGITIMERSSFEKNPIDFLEAKGYKEVKKDLIIKLPK |
| | | YSLFELENGRKRMLASAGELQKGNELALPSKYVNFLYLASHYEKLKGSPEDNEQKQLFVE |
| | | QHKHYLDEIIEQISEFSKRVILADANLDKVLSAYNKHRDKPIREQAENIIHLFTLTNLGA |
| | | PAAFKYFDTTIDRKRYTSTKEVLDATLIHQSITGLYETRIDLSQLGGD |
| 13 | dSaCas9 | MKRNYILGLAIGITSVGYGIIDYETRDVIDAGVRLFKEANVENNEGRRSKRGARRLKRRR |
| | | RHRIQRVKKLLFDYNLLTDHSELSGINPYEARVKGLSQKLSEEEFSAALLHLAKRRGVHN |
| | | VNEVEEDTGNELSTKEQISRNSKALEEKYVAELQLERLKKDGEVRGSINRFKTSDYVKEA |
| | | KQLLKVQKAYHQLDQSFIDTYIDLLETRRTYYEGPGEGSPFGWKDIKEWYEMLMGHCTYF |
| | | PEELRSVKYAYNADLYNALNDLNNLVITRDENEKLEYYEKFQIIENVFKQKKKPTLKQIA |
| | | KEILVNEEDIKGYRVTSTGKPEFTNLKVYHDIKDITARKEIIENAELLDQIAKILTIYQS |
| | | SEDIQEELTNLNSELTQEEIEQISNLKGYTGTHNLSLKAINLILDELWHINDNQIAIFNR |
| | | LKLVPKKVDLSQQKEIPTTLVDDFILSPVVKRSFIQSIKVINAIIKKYGLPNDIIIELAR |
| | | EKNSKDAQKMINEMQKRNRQTNERIEEIIRTTGKENAKYLIEKIKLHDMQEGKCLYSLEA |
| | | IPLEDLLNNPFNYEVDHIIPRSVSFDNSFNNKVLVKQEEASKKGNRTPFQYLSSSDSKIS |
| | | YETFKKHILNLAKGKGRISKTKKEYLLEERDINRFSVQKDFINRNLVDTRYATRGLMNLL |
| | | RSYFRVNNLDVKVKSINGGFTSFLRRKWKFKKERNKGYKHHAEDALIIANADFIFKEWKK |
| | | LDKAKKVMENQMFEEKQAESMPEIETEQEYKEIFITPHQIKHIKDFKDYKYSHRVDKKPN |
| | | RELINDTLYSTRKDDKGNTLIVNNLNGLYDKDNDKLKKLINKSPEKLLMYHHDPQTYQKL |
| | | KLIMEQYGDEKNPLYKYYEETGNYLTKYSKKDNGPVIKKIKYYGNKLNAHLDITDDYPNS |
| | | RNKVVKLSLKPYRFDVYLDNGVYKFVTVKNLDVIKKENYYEVNSKCYEEAKKLKKISNQA |
| | | EFIASFYNNDLIKINGELYRVIGVNNDLLNRIEVNMIDITYREYLENMNDKRPPRIIKTI |
| | | ASKTQSIKKYSTDILGNLYEVKSKKHPQIIKKG |
| 14 | inactive FnCpf1 | MSIYQEFVNKYSLSKTLRFELIPQGKTLENIKARGLILDDEKRAKDYKKAKQIIDKYHQF |
| | | FIEEILSSVCISEDLLQNYSDVYFKLKKSDDDNLQKDFKSAKDTIKKQISEYIKDSEKFK |
| | | NLFNQNLIDAKKGQESDLILWLKQSKDNGIELFKANSDITDIDEALEIIKSFKGWTTYFK |
| | | GFHENRKNVYSSNDIPTSIIYRIVDDNLPKFLENKAKYESLKDKAPEAINYEQIKKDLAE |
| | | ELTFDIDYKTSEVNQRVFSLDEVFEIANFNNYLNQSGITKFNTIIGGKFVNGENTKRKGI |
| | | NEYINLYSQQINDKTLKKYKMSVLFKQILSDTESKSFVIDKLFDDSDVVTTMQSFYEQIA |
| | | AFKTVEEKSIKETLSLLFDDLKAQKLDLSKIYFKNDKSLTDLSQQVFDDYSVIGTAVLEY |
| | | ITQQIAPKNLDNPSKKEQELIAKKTEKAKYLSLETIKLALEEFNKHRDIDKQCRFEEILA |
| | | NFAAIPMIFDEIAQNKDNLAQISIKYQNQGKKDLLQASAEDDVKAIKDLLDQTNNLLHKL |
| | | KIFHISQSEDKANILDKDEHFYLVFEECYFELANIVPLYNKIRNYITQKPYSDEKFKLNF |
| | | ENSTLANGWDKNKEPDNTAILFIKDDKYYLGVMNKKNNKIFDDKAIKENKGEGYKKIVYK |
| | | LLPGANKMLPKVFFSAKSIKFYNPSEDILRIRNHSTHTKNGSPQKGYEKFEFNIEDCRKF |
| | | IDFYKQSISKHPEWKDFGFRFSDTQRYNSIDEFYREVENQGYKLTFENISESYIDSVVNQ |
| | | GKLYLFQIYNKDFSAYSKGRPNLHTLYWKALFDERNLQDVVYKLNGEAELFYRKQSIPKK |
| | | ITHPAKEAIANKNKDNPKKESVFEYDLIKDKRFTEDKFFFHCPITINFKSSGANKFNDEI |
| | | NLLLKEKANDVHILSIARGERHLAYYTLVDGKGNIIKQDTFNIIGNDRMKTNYHDKLAAI |
| | | EKDRDSARKDWKKINNIKEMKEGYLSQVVHEIAKLVIEYNAIVVFEDLNFGFKRGRFKVE |
| | | KQVYQKLEKMLIEKLNYLVFKDNEFDKTGGVLRAYQLTAPFETFKKMGKQTGIIYYVPAG |
| | | FTSKICPVTGFVNQLYPKYESVSKSQEFFSKFDKICYNLDKGYFEFSFDYKNFGDKAAKG |
| | | KWTIASFGSRLINFRNSDKNHNWDTREVYPTKELEKLLKDYSIEYGHGECIKAAICGESD |
| | | KKFFAKLTSVLNTILQMRNSKTGTELDYLISPVADVNGNFFDSRQAPKNMPQDADANGAY |
| | | HIGLKGLMLLGRIKNNQEGKKLNLVIKNEEYFEFVQNRNN |
| 15 | dNmeCas9 | MAAFKPNSINYILGLAIGIASVGWAMVEIDEEENPIRLIDLGVRVFERAEVPKTGDSLAM |
| | | ARRLARSVRRLTRRRAHRLLRTRRLLKREGVLQAANFDENGLIKSLPNTPWQLRAAALDR |
| | | KLTPLEWSAVLLHLIKHRGYLSQRKNEGETADKELGALLKGVAGNAHALQTGDFRTPAEL |
| | | ALNKFEKESGHIRNQRSDYSHTFSRKDLQAELILLFEKQKEFGNPHVSGGLKEGIETLLM |
| | | TQRPALSGDAVQKMLGHCTFEPAEPKAAKNTYTAERFIWLTKLNNLRILEQGSERPLTDT |
| | | ERATLMDEPYRKSKLTYAQARKLLGLEDTAFFKGLRYGKDNAEASTLMEMKAYHAISRAL |
| | | EKEGLKDKKSPLNLSPELQDEIGTAFSLFKTDEDITGRLKDRIQPEILEALLKHISFDKF |
| | | VQISLKALRRIVPLMEQGKRYDEACAEIYGDHYGKKNTEEKIYLPPIPADEIRNPVVLRA |
| | | LSQARKVINGVVRRYGSPARIHIETAREVGKSFKDRKEIEKRQEFNRKDREKAAAKFREY |
| | | FPNFVGEPKSKDILKLRLYEQQHGKCLYSGKEINLGRLNEKGYVEIDAALPFSRTWDDSF |
| | | NNKVLVLGSENQNKGNQTPYEYFNGKDNSREWQEFKARVETSRFPRSKKQRILLQKFDED |
| | | GFKERNLNDTRYVNRFLCQFVADRMRLTGKGKKRVFASNGQITNLLRGFWGLRKVRAEND |
| | | RHHALDAVVVACSTVAMQQKITRFVRYKEMNAFDGKTIDKETGEVLHQKTHFPQPWEFFA |
| | | QEVMIRVFGKPDGKPEFEEADTLEKLRTLLAEKLSSRPEAVHEYVTPLFVSRAPNRKMSG |
| | | QGHMETVKSAKRLDEGVSVLRVPLTQLKLKDLEKMVNREREPKLYEALKARLEAHKDDPA |
| | | KAFAEPFYKYDKAGNRTQQVKAVRVEQVQKTGVWVRNHNGIADNATMVRVDVFEKGDKYY |
| | | LVPIYSWQVAKGILPDRAVVQGKDEEDWQLIDDSFNFKFSLHPNDLVEVITKKARMFGYF |
| | | ASCHRGTGNINIRIHDLDHKIGKNGILEGIGVKTALSFQKYQIDELGKEIRPCRLKKRPP |
| | | VR |
| 16 | dCjCas9 | MARILAFAIGISSIGWAFSENDELKDCGVRIFTKVENPKTGESLALPRRLARSARKRLAR |
| | | RKARLNHLKHLIANEFKLNYEDYQSFDESLAKAYKGSLISPYELRFRALNELLSKQDFAR |
| | | VILHIAKRRGYDDIKNSDDKEKGAILKAIKQNEEKLANYQSVGEYLYKEYFQKFKENSKE |
| | | FTNVRNKKESYERCIAQSFLKDELKLIFKKQREFGFSFSKKFEEEVLSVAFYKRALKDFS |
| | | HLVGNCSFFTDEKRAPKNSPLAFMFVALTRIINLLNNLKNTEGILYTKDDLNALLNEVLK |
| | | NGTLTYKQTKKLLGLSDDYEFKGEKGTYFIEFKKYKEFIKALGEHNLSQDDLNEIAKDIT |
| | | LIKDEIKLKKALAKYDLNQNQIDSLSKLEFKDHLNISFKALKLVTPLMLEGKKYDEACNE |
| | | LNLKVAINEDKKDFLPAFNETYYKDEVTNPVVLRAIKEYRKVLNALLKKYGKVHKINIEL |
| | | AREVGKNHSQRAKIEKEQNENYKAKKDAELECEKLGLKINSKNILKLRLFKEQKEFCAYS |
| | | GEKIKISDLQDEKMLEIDAIYPYSRSFDDSYMNKVLVFTKQNQEKLNQTPFEAFGNDSAK |
| | | WQKIEVLAKNLPTKKQKRILDKNYKDKEQKNFKDRNLNDTRYIARLVLNYTKDYLDFLPL |
| | | SDDENTKLNDTQKGSKVHVEAKSGMLTSALRHTWGFSAKDRNNHLHHAIDAVIIAYANNS |
| | | IVKAFSDFKKEQESNSAELYAKKISELDYKNKRKFFEPFSGFRQKVLDKIDEIFVSKPER |
| | | KKPSGALHEETFRKEEEFYQSYGGKEGVLKALELGKIRKVNGKIVKNGDMFRVDIFKHKK |
| | | TNKFYAVPIYTMDFALKVLPNKAVARSKKGEIKDWILMDENYEFCFSLYKDSLILIQTKD |
| | | MQEPEFVYYNAFTSSTVSLIVSKHDNKFETLSKNQKILFKNANEKEVIAKSIGIQNLKVE |
| | | EKYIVSALGEVTKAEFRQREDFKK |
| 17 | dSt1Cas9 | MGSDLVLGLAIGIGSVGVGILNKVTGEIIHKNSRIFPAAQAENNLVRRTNRQGRRLARRK |
| | | KHRRVRLNRLFEESGLITDFTKISININPYQLRVKGLTDELSNEELFIALKNMVKHRGIS |
| | | YLDDASDDGNSSVGDYAQIVKENSKQLETKTPGQIQLERYQTYGQLRGDFTVEKDGKKHR |
| | | LINVFPTSAYRSEALRILQTQQEFNPQITDEFINRYLEILTGKRKYYHGPGNEKSRTDYG |
| | | RYRTSGETLDNIFGILIGKCTFYPDEFRAAKASYTAQEFNLLNDLNNLTVPTETKKLSKE |
| | | QKNQIINYVKNEKAMGPAKLFKYIAKLLSCDVADIKGYRIDKSGKAEIHTFEAYRKMKTL |
| | | ETLDIEQMDRETLDKLAYVLTLNTEREGIQEALEHEFADGSFSQKQVDELVQFRKANSSI |
| | | FGKGWHNFSVKLMMELIPELYETSEEQMTILTRLGKQKTTSSSNKTKYIDEKLLTEEIYN |
| | | PVVAKSVRQAIKIVNAAIKEYGDFDNIVIEMARETNEDDEKKAIQKIQKANKDEKDAAML |
| | | KAANQYNGKAELPHSVFHGHKQLATKIRLWHQQGERCLYTGKTISIHDLINNSNQFEVDA |
| | | ILPLSITFDDSLANKVLVYATANQEKGQRTPYQALDSMDDAWSFRELKAFVRESKTLSNK |
| | | KKEYLLTEEDISKFDVRKKFIERNLVDTRYASRVVLNALQEHFRAHKIDTKVSVVRGQFT |
| | | SQLRRHWGIEKTRDTYHHHAVDALIIAASSQLNLWKKQKNTLVSYSEDQLLDIETGELIS |
| | | DDEYKESVFKAPYQHFVDTLKSKEFEDSILFSYQVDSKFNRKISDATIYATRQAKVGKDK |
| | | ADETYVLGKIKDIYTQDGYDAFMKIYKKDKSKFLMYRHDPQTFEKVIEPILENYPNKQIN |
| | | EKGKEVPCNPFLKYKEEHGYIRKYSKKGNGPEIKSLKYYDSKLGNHIDITPKDSNNKVVL |
| | | QSVSPWRADVYFNKTTGKYEILGLKYADLQFEKGTGTYKISQEKYNDIKKKEGVDSDSEF |
| | | KFTLYKNDLLLVKDTETKEQQLFRFLSRTMPKQKHYVELKPYDKQKFEGGEALIKVLGNV |
| | | ANSGQCKKGLGKSNISIYKVRTDVLGNQHIIKNEGDKPKLDF |
| 18 | dSt3Cas9 | MTKPYSIGLAIGTNSVGWAVITDNYKVPSKKMKVLGNTSKKYIKKNLLGVLLFDSGITAE |
| | | GRRLKRTARRRYTRRRNRILYLQEIFSTEMATLDDAFFQRLDDSFLVPDDKRDSKYPIFG |
| | | NLVEEKVYHDEFPTIYHLRKYLADSTKKADLRLVYLALAHMIKYRGHFLIEGEFNSKNND |
| | | IQKNFQDFLDTYNAIFESDLSLENSKQLEEIVKDKISKLEKKDRILKLFPGEKNSGIFSE |
| | | FLKLIVGNQADFRKCFNLDEKASLHFSKESYDEDLETLLGYIGDDYSDVFLKAKKLYDAI |
| | | LLSGFLTVTDNETEAPLSSAMIKRYNEHKEDLALLKEYIRNISLKTYNEVFKDDTKNGYA |
| | | GYIDGKTNQEDFYVYLKNLLAEFEGADYFLEKIDREDFLRKQRTFDNGSIPYQIHLQEMR |
| | | AILDKQAKFYPFLAKNKERIEKILTFRIPYYVGPLARGNSDFAWSIRKRNEKITPWNFED |
| | | VIDKESSAEAFINRMTSFDLYLPEEKVLPKHSLLYETFNVYNELTKVRFIAESMRDYQFL |
| | | DSKQKKDIVRLYFKDKRKVTDKDIIEYLHAIYGYDGIELKGIEKQFNSSLSTYHDLLNII |
| | | NDKEFLDDSSNEAIIEEIIHTLTIFEDREMIKQRLSKFENIFDKSVLKKLSRRHYTGWGK |
| | | LSAKLINGIRDEKSGNTILDYLIDDGISNRNFMQLIHDDALSFKKKIQKAQIIGDEDKGN |
| | | IKEVVKSLPGSPAIKKGILQSIKIVDELVKVMGGRKPESIVVEMARENQYTNQGKSNSQQ |
| | | RLKRLEKSLKELGSKILKENIPAKLSKIDNNALQNDRLYLYYLQNGKDMYTGDDLDIDRL |
| | | SNYDIDHIIPQAFLKDNSIDNKVLVSSASARGKSDDFPSLEVVKKRKTFWYQLLKSKLIS |
| | | QRKFDNLTKAERGGLLPEDKAGFIQRQLVETRQITKHVARLLDEKFNNKKDENNRAVRTV |
| | | KIITLKSTLVSQFRKDFELYKVREINDFHHAHDAYLNAVIASALLKKYPKLEPEFVYGDY |
| | | PKYNSFRERKSATEKVYFYSNIMNIFKKSISLADGRVIERPLIEVNEETGESVWNKESDL |
| | | ATVRRVLSYPQVNVVKKVEEQNHGLDRGKPKGLFNANLSSKPKPNSNENLVGAKEYLDPK |
| | | KYGGYAGISNSFAVLVKGTIEKGAKKKITNVLEFQGISILDRINYRKDKLNFLLEKGYKD |
| | | IELIIELPKYSLFELSDGSRRMLASILSTNNKRGEIHKGNQIFLSQKFVKLLYHAKRISN |
| | | TINENHRKYVENHKKEFEELFYYILEFNENYVGAKKNGKLLNSAFQSWQNHSIDELCSSF |
| | | IGPTGSERKGLFELTSRGSAADFEFLGVKIPRYRDYTPSSLLKDATLIHQSVTGLYETRI |
| | | DLAKLGEG |
| 19 | dLbCpf1 | MSKLEKFTNCYSLSKTLRFKAIPVGKTQENIDNKRLLVEDEKRAEDYKGVKKLLDRYYLS |
| | | FINDVLHSIKLKNLNNYISLFRKKTRTEKENKELENLEINLRKEIAKAFKGNEGYKSLFK |
| | | KDIIETILPEFLDDKDEIALVNSFNGFTTAFTGFFDNRENMFSEEAKSTSIAFRCINENL |
| | | TRYISNMDIFEKVDAIFDKHEVQEIKEKILNSDYDVEDFFEGEFFNFVLTQEGIDVYNAI |
| | | IGGFVTESGEKIKGLNEYINLYNQKTKQKLPKFKPLYKQVLSDRESLSFYGEGYTSDEEV |
| | | LEVFRNTLNKNSEIFSSIKKLEKLFKNFDEYSSAGIFVKNGPAISTISKDIFGEWNVIRD |
| | | KWNAEYDDIHLKKKAVVTEKYEDDRRKSFKKIGSFSLEQLQEYADADLSVVEKLKEIIIQ |
| | | KVDEIYKVYGSSEKLFDADFVLEKSLKKNDAVVAIMKDLLDSVKSFENYIKAFFGEGKET |
| | | NRDESFYGDFVLAYDILLKVDHIYDAIRNYVTQKPYSKDKFKLYFQNPQFMGGWDKDKET |
| | | DYRATILRYGSKYYLAIMDKKYAKCLQKIDKDDVNGNYEKINYKLLPGPNKMLPKVFFSK |
| | | KWMAYYNPSEDIQKIYKNGTFKKGDMFNLNDCHKLIDFFKDSISRYPKWSNAYDFNFSET |
| | | EKYKDIAGFYREVEEQGYKVSFESASKKEVDKLVEEGKLYMFQIYNKDFSDKSHGTPNLH |
| | | TMYFKLLFDENNHGQIRLSGGAELFMRRASLKKEELVVHPANSPIANKNPDNPKKTTTLS |
| | | YDVYKDKRFSEDQYELHIPIAINKCPKNIFKINTEVRVLLKHDDNPYVIGIARGERNLLY |
| | | IVVVDGKGNIVEQYSLNEIINNFNGIRIKTDYHSLLDKKEKERFEARQNWTSIENIKELK |
| | | AGYISQVVHKICELVEKYDAVIALEDLNSGFKNSRVKVEKQVYQKFEKMLIDKLNYMVDK |
| | | KSNPCATGGALKGYQITNKFESFKSMSTQNGFIFYIPAWLTSKIDPSTGFVNLLKTKYTS |
| | | IADSKKFISSFDRIMYVPEEDLFEFALDYKNFSRTDADYIKKWKLYSYGNRIRIFRNPKK |
| | | NNVFDWEEVCLTSAYKELFNKYGINYQQGDIRALLCEQSDKAFYSSEMALMSLMLQMRNS |
| | | ITGRTDVDFLISPVKNSDGIFYDSRNYEAQENAILPKNADANGAYNIARKVLWAIGQFKK |
| | | AEDEKLDKVKIAISNKEWLEYAQTSVKH |
| 20 | inactive AsCpf1 | MTQFEGFTNLYQVSKTLRFELIPQGKTLKHIQEQGFIEEDKARNDHYKELKPIIDRIYKT |
| | | YADQCLQLVQLDWENLSAAIDSYRKEKTEETRNALIEEQATYRNAIHDYFIGRTDNLTDA |
| | | INKRHAEIYKGLFKAELFNGKVLKQLGTVTTTEHENALLRSFDKFTTYFSGFYFNRKNVF |
| | | SAEDISTAIPHRIVQDNFPKFKENCHIFTRLITAVPSLREHFENVKKAIGIFVSTSIEEV |
| | | FSFPFYNQLLTQTQIDLYNQLLGGISREAGTEKIKGLNEVLNLAIQKNDETAHIIASLPH |
| | | RFIPLFKQILSDRNTLSFILEEFKSDEEVIQSFCKYKTLLRNENVLETAEALFNELNSID |
| | | LTHIFISHKKLETISSALCDHWDTLRNALYERRISELTGKITKSAKEKVQRSLKHEDINL |
| | | QEIISAAGKELSEAFKQKTSEILSHAHAALDQPLPTTLKKQEEKEILKSQLDSLLGLYHL |
| | | LDWFAVDESNEVDPEFSARLTGIKLEMEPSLSFYNKARNYATKKPYSVEKFKLNFQMPTL |
| | | ASGWDVNKEKNNGAILFVKNGLYYLGIMPKQKGRYKALSFEPTEKTSEGFDKMYYDYFPD |
| | | AAKMIPKCSTQLKAVTAHFQTHTTPILLSNNFIEPLEITKEIYDLNNPEKEPKKFQTAYA |
| | | KKTGDQKGYREALCKWIDFTRDFLSKYTKTTSIDLSSLRPSSQYKDLGEYYAELNPLLYH |
| | | ISFQRIAEKEIMDAVETGKLYLFQIYNKDFAKGHHGKPNLHTLYWTGLFSPENLAKTSIK |
| | | LNGQAELFYRPKSRMKRMAHRLGEKMLNKKLKDQKTPIPDTLYQELYDYVNHRLSHDLSD |
| | | EARALLPNVITKEVSHEIIKDRRFTSDKFFFHVPITLNYQAANSPSKFNQRVNAYLKEHP |
| | | ETPIIGIARGERNLIYITVIDSTGKILEQRSLNTIQQFDYQKKLDNREKERVAARQAWSV |
| | | VGTIKDLKQGYLSQVIHEIVDLMIHYQAVVVLENLNFGFKSKRTGIAEKAVYQQFEKMLI |
| | | DKLNCLVLKDYPAEKVGGVLNPYQLTDQFTSFAKMGTQSGFLFYVPAPYTSKIDPLTGFV |
| | | DPFVWKTIKNHESRKHFLEGFDFLHYDVKTGDFILHFKMNRNLSFQRGLPGFMPAWDIVF |
| | | EKNETQFDAKGTPFIAGKRIVPVIENHRFTGRYRDLYPANELIALLEEKGIVFRDGSNIL |
| | | PKLLENDDSHAIDTMVALIRSVLQMRNSNAATGEDYINSPVRDLNGVCFDSRFQNPEWPM |
| | | DADANGAYHIALKGQLLLNHLKESKDLKLQNGISNQDWLAYIQELRN |
| 21 | inactive | MTQFEGFTNLYQVSKTLRFELIPQGKTLKHIQEQGFIEEDKARNDHYKELKPIIDRIYKT |
| | enAsCpf1 | YADQCLQLVQLDWENLSAAIDSYRKEKTEETRNALIEEQATYRNAIHDYFIGRTDNLTDA |
| | | INKRHAEIYKGLFKAELFNGKVLKQLGTVTTTEHENALLRSFDKFTTYFSGFYRNRKNVF |
| | | SAEDISTAIPHRIVQDNFPKFKENCHIFTRLITAVPSLREHFENVKKAIGIFVSTSIEEV |
| | | FSFPFYNQLLTQTQIDLYNQLLGGISREAGTEKIKGLNEVLNLAIQKNDETAHIIASLPH |
| | | RFIPLFKQILSDRNTLSFILEEFKSDEEVIQSFCKYKTLLRNENVLETAEALFNELNSID |
| | | LTHIFISHKKLETISSALCDHWDTLRNALYERRISELTGKITKSAKEKVQRSLKHEDINL |
| | | QEIISAAGKELSEAFKQKTSEILSHAHAALDQPLPTTLKKQEEKEILKSQLDSLLGLYHL |
| | | LDWFAVDESNEVDPEFSARLTGIKLEMEPSLSFYNKARNYATKKPYSVEKFKLNFQMPTL |
| | | ARGWDVNREKNNGAILFVKNGLYYLGIMPKQKGRYKALSFEPTEKTSEGFDKMYYDYFPD |
| | | AAKMIPKCSTQLKAVTAHFQTHTTPILLSNNFIEPLEITKEIYDLNNPEKEPKKFQTAYA |
| | | KKTGDQKGYREALCKWIDFTRDFLSKYTKTTSIDLSSLRPSSQYKDLGEYYAELNPLLYH |
| | | ISFQRIAEKEIMDAVETGKLYLFQIYNKDFAKGHHGKPNLHTLYWTGLFSPENLAKTSIK |
| | | LNGQAELFYRPKSRMKRMAHRLGEKMLNKKLKDQKTPIPDTLYQELYDYVNHRLSHDLSD |
| | | EARALLPNVITKEVSHEIIKDRRFTSDKFFFHVPITLNYQAANSPSKFNQRVNAYLKEHP |
| | | ETPIIGIARGERNLIYITVIDSTGKILEQRSLNTIQQFDYQKKLDNREKERVAARQAWSV |
| | | VGTIKDLKQGYLSQVIHEIVDLMIHYQAVVVLENLNFGFKSKRTGIAEKAVYQQFEKMLI |
| | | DKLNCLVLKDYPAEKVGGVLNPYQLTDQFTSFAKMGTQSGFLFYVPAPYTSKIDPLTGFV |
| | | DPFVWKTIKNHESRKHFLEGFDFLHYDVKTGDFILHFKMNRNLSFQRGLPGFMPAWDIVF |
| | | EKNETQFDAKGTPFIAGKRIVPVIENHRFTGRYRDLYPANELIALLEEKGIVFRDGSNIL |
| | | PKLLENDDSHAIDTMVALIRSVLQMRNSNAATGEDYINSPVRDLNGVCFDSRFQNPEWPM |
| | | DADANGAYHIALKGQLLLNHLKESKDLKLQNGISNQDWLAYIQELRN |
| 22 | inactive | MTQFEGFTNLYQVSKTLRFELIPQGKTLKHIQEQGFIEEDKARNDHYKELKPIIDRIYKT |
| | HFAsCpf1 | YADQCLQLVQLDWENLSAAIDSYRKEKTEETRNALIEEQATYRNAIHDYFIGRTDNLTDA |
| | | INKRHAEIYKGLFKAELFNGKVLKQLGTVTTTEHENALLRSFDKFTTYFSGFYRNRKNVF |
| | | SAEDISTAIPHRIVQDNFPKFKENCHIFTRLITAVPSLREHFENVKKAIGIFVSTSIEEV |
| | | FSFPFYNQLLTQTQIDLYNQLLGGISREAGTEKIKGLNEVLALAIQKNDETAHIIASLPH |
| | | RFIPLFKQILSDRNTLSFILEEFKSDEEVIQSFCKYKTLLRNENVLETAEALFNELNSID |
| | | LTHIFISHKKLETISSALCDHWDTLRNALYERRISELTGKITKSAKEKVQRSLKHEDINL |
| | | QEIISAAGKELSEAFKQKTSEILSHAHAALDQPLPTTLKKQEEKEILKSQLDSLLGLYHL |
| | | LDWFAVDESNEVDPEFSARLTGIKLEMEPSLSFYNKARNYATKKPYSVEKFKLNFQMPTL |
| | | ARGWDVNREKNNGAILFVKNGLYYLGIMPKQKGRYKALSFEPTEKTSEGFDKMYYDYFPD |
| | | AAKMIPKCSTQLKAVTAHFQTHTTPILLSNNFIEPLEITKEIYDLNNPEKEPKKFQTAYA |
| | | KKTGDQKGYREALCKWIDFTRDFLSKYTKTTSIDLSSLRPSSQYKDLGEYYAELNPLLYH |
| | | ISFQRIAEKEIMDAVETGKLYLFQIYNKDFAKGHHGKPNLHTLYWTGLFSPENLAKTSIK |
| | | LNGQAELFYRPKSRMKRMAHRLGEKMLNKKLKDQKTPIPDTLYQELYDYVNHRLSHDLSD |
| | | EARALLPNVITKEVSHEIIKDRRFTSDKFFFHVPITLNYQAANSPSKFNQRVNAYLKEHP |
| | | ETPIIGIARGERNLIYITVIDSTGKILEQRSLNTIQQFDYQKKLDNREKERVAARQAWSV |
| | | VGTIKDLKQGYLSQVIHEIVDLMIHYQAVVVLENLNFGFKSKRTGIAEKAVYQQFEKMLI |
| | | DKLNCLVLKDYPAEKVGGVLNPYQLTDQFTSFAKMGTQSGFLFYVPAPYTSKIDPLTGFV |
| | | DPFVWKTIKNHESRKHFLEGFDFLHYDVKTGDFILHFKMNRNLSFQRGLPGFMPAWDIVF |
| | | EKNETQFDAKGTPFIAGKRIVPVIENHRFTGRYRDLYPANELIALLEEKGIVFRDGSNIL |
| | | PKLLENDDSHAIDTMVALIRSVLQMRNSNAATGEDYINSPVRDLNGVCFDSRFQNPEWPM |
| | | DADANGAYHIALKGQLLLNHLKESKDLKLQNGISNQDWLAYIQELRN |
| 23 | inactive | MTQFEGFTNLYQVSKTLRFELIPQGKTLKHIQEQGFIEEDKARNDHYKELKPIIDRIYKT |
| | RVRAsCpf1 | YADQCLQLVQLDWENLSAAIDSYRKEKTEETRNALIEEQATYRNAIHDYFIGRTDNLTDA |
| | | INKRHAEIYKGLFKAELFNGKVLKQLGTVTTTEHENALLRSFDKFTTYFSGFYFNRKNVF |
| | | SAEDISTAIPHRIVQDNFPKFKENCHIFTRLITAVPSLREHFENVKKAIGIFVSTSIEEV |
| | | FSFPFYNQLLTQTQIDLYNQLLGGISREAGTEKIKGLNEVLNLAIQKNDETAHIIASLPH |
| | | RFIPLFKQILSDRNTLSFILEEFKSDEEVIQSFCKYKTLLRNENVLETAEALFNELNSID |
| | | LTHIFISHKKLETISSALCDHWDTLRNALYERRISELTGKITKSAKEKVQRSLKHEDINL |
| | | QEIISAAGKELSEAFKQKTSEILSHAHAALDQPLPTTLKKQEEKEILKSQLDSLLGLYHL |
| | | LDWFAVDESNEVDPEFSARLTGIKLEMEPSLSFYNKARNYATKKPYSVEKFKLNFQMPTL |
| | | ARGWDVNVEKNRGAILFVKNGLYYLGIMPKQKGRYKALSFEPTEKTSEGFDKMYYDYFPD |
| | | AAKMIPKCSTQLKAVTAHFQTHTTPILLSNNFIEPLEITKEIYDLNNPEKEPKKFQTAYA |
| | | KKTGDQKGYREALCKWIDFTRDFLSKYTKTTSIDLSSLRPSSQYKDLGEYYAELNPLLYH |
| | | ISFQRIAEKEIMDAVETGKLYLFQIYNKDFAKGHHGKPNLHTLYWTGLFSPENLAKTSIK |
| | | LNGQAELFYRPKSRMKRMAHRLGEKMLNKKLKDQKTPIPDTLYQELYDYVNHRLSHDLSD |
| | | EARALLPNVITKEVSHEIIKDRRFTSDKFFFHVPITLNYQAANSPSKFNQRVNAYLKEHP |
| | | ETPIIGIARGERNLIYITVIDSTGKILEQRSLNTIQQFDYQKKLDNREKERVAARQAWSV |
| | | VGTIKDLKQGYLSQVIHEIVDLMIHYQAVVVLENLNFGFKSKRTGIAEKAVYQQFEKMLI |
| | | DKLNCLVLKDYPAEKVGGVLNPYQLTDQFTSFAKMGTQSGFLFYVPAPYTSKIDPLTGFV |
| | | DPFVWKTIKNHESRKHFLEGFDFLHYDVKTGDFILHFKMNRNLSFQRGLPGFMPAWDIVF |
| | | EKNETQFDAKGTPFIAGKRIVPVIENHRFTGRYRDLYPANELIALLEEKGIVFRDGSNIL |
| | | PKLLENDDSHAIDTMVALIRSVLQMRNSNAATGEDYINSPVRDLNGVCFDSRFQNPEWPM |
| | | DADANGAYHIALKGQLLLNHLKESKDLKLQNGISNQDWLAYIQELRN |
| 24 | inactive | MTQFEGFTNLYQVSKTLRFELIPQGKTLKHIQEQGFIEEDKARNDHYKELKPIIDRIYKT |
| | RRAsCpf1 | YADQCLQLVQLDWENLSAAIDSYRKEKTEETRNALIEEQATYRNAIHDYFIGRTDNLTDA |
| | | INKRHAEIYKGLFKAELFNGKVLKQLGTVTTTEHENALLRSFDKFTTYFSGFYFNRKNVF |
| | | SAEDISTAIPHRIVQDNFPKFKENCHIFTRLITAVPSLREHFENVKKAIGIFVSTSIEEV |
| | | FSFPFYNQLLTQTQIDLYNQLLGGISREAGTEKIKGLNEVLNLAIQKNDETAHIIASLPH |
| | | RFIPLFKQILSDRNTLSFILEEFKSDEEVIQSFCKYKTLLRNENVLETAEALFNELNSID |
| | | LTHIFISHKKLETISSALCDHWDTLRNALYERRISELTGKITKSAKEKVQRSLKHEDINL |
| | | QEIISAAGKELSEAFKQKTSEILSHAHAALDQPLPTTLKKQEEKEILKSQLDSLLGLYHL |
| | | LDWFAVDESNEVDPEFSARLTGIKLEMEPSLSFYNKARNYATKKPYSVEKFKLNFQMPTL |
| | | ARGWDVNKEKNNGAILFVKNGLYYLGIMPKQKGRYKALSFEPTEKTSEGFDKMYYDYFPD |
| | | AAKMIPRCSTQLKAVTAHFQTHTTPILLSNNFIEPLEITKEIYDLNNPEKEPKKFQTAYA |
| | | KKTGDQKGYREALCKWIDFTRDFLSKYTKTTSIDLSSLRPSSQYKDLGEYYAELNPLLYH |
| | | ISFQRIAEKEIMDAVETGKLYLFQIYNKDFAKGHHGKPNLHTLYWTGLFSPENLAKTSIK |
| | | LNGQAELFYRPKSRMKRMAHRLGEKMLNKKLKDQKTPIPDTLYQELYDYVNHRLSHDLSD |
| | | EARALLPNVITKEVSHEIIKDRRFTSDKFFFHVPITLNYQAANSPSKFNQRVNAYLKEHP |
| | | ETPIIGIARGERNLIYITVIDSTGKILEQRSLNTIQQFDYQKKLDNREKERVAARQAWSV |
| | | VGTIKDLKQGYLSQVIHEIVDLMIHYQAVVVLENLNFGFKSKRTGIAEKAVYQQFEKMLI |
| | | DKLNCLVLKDYPAEKVGGVLNPYQLTDQFTSFAKMGTQSGFLFYVPAPYTSKIDPLTGFV |
| | | DPFVWKTIKNHESRKHFLEGFDFLHYDVKTGDFILHFKMNRNLSFQRGLPGFMPAWDIVF |
| | | EKNETQFDAKGTPFIAGKRIVPVIENHRFTGRYRDLYPANELIALLEEKGIVFRDGSNIL |
| | | PKLLENDDSHAIDTMVALIRSVLQMRNSNAATGEDYINSPVRDLNGVCFDSRFQNPEWPM |
| | | DADANGAYHIALKGQLLLNHLKESKDLKLQNGISNQDWLAYIQELRN |
| 25 | dCasX | MEKRINKIRKKLSADNATKPVSRSGPMKTLLVRVMTDDLKKRLEKRRKKPEVMPQVISNN |
| | | AANNLRMLLDDYTKMKEAILQVYWQEFKDDHVGLMCKFAQPASKKIDQNKLKPEMDEKGN |
| | | LTTAGFACSQCGQPLFVYKLEQVSEKGKAYTNYFGRCNVAEHEKLILLAQLKPEKDSDEA |
| | | VTYSLGKFGQRALDFYSIHVTKESTHPVKPLAQIAGNRYASGPVGKALSDACMGTIASFL |
| | | SKYQDIIIEHQKVVKGNQKRLESLRELAGKENLEYPSVTLPPQPHTKEGVDAYNEVIARV |
| | | RMWVNLNLWQKLKLSRDDAKPLLRLKGFPSFPVVERRENEVDWWNTINEVKKLIDAKRDM |
| | | GRVFWSGVTAEKRNTILEGYNYLPNENDHKKREGSLENPKKPAKRQFGDLLLYLEKKYAG |
| | | DWGKVFDEAWERIDKKIAGLTSHIEREEARNAEDAQSKAVLTDWLRAKASFVLERLKEMD |
| | | EKEFYACEIQLQKWYGDLRGNPFAVEAENRVVDISGFSIGSDGHSIQYRNLLAWKYLENG |
| | | KREFYLLMNYGKKGRIRFTDGTDIKKSGKWQGLLYGGGKAKVIDLTFDPDDEQLIILPLA |
| | | FGTRQGREFIWNDLLSLETGLIKLANGRVIEKTIYNKKIGRDEPALFVALTFERREVVDP |
| | | SNIKPVNLIGVARGENIPAVIALTDPEGCPLPEFKDSSGGPTDILRIGEGYKEKQRAIQA |
| | | AKEVEQRRAGGYSRKFASKSRNLADDMVRNSARDLFYHAVTHDAVLVFANLSRGFGRQGK |
| | | RTFMTERQYTKMEDWLTAKLAYEGLTSKTYLSKTLAQYTSKTCSNCGFTITTADYDGMLV |
| | | RLKKTSDGWATTLNNKELKAEGQITYYNRYKRQTVEKELSAELDRLSEESGNNDISKWTK |
| | | GRRDEALFLLKKRFSHRPVQEQFVCLDCGHEVHAAEQAALNIARSWLFLNSNSTEFKSYK |
| | | SGKQPFVGAWQAFYKRRLKEVWKPNA |
| 26 | dCasPhi | MPKPAVESEFSKVLKKHFPGERFRSSYMKRGGKILAAQGEEAVVAYLQGKSEEEPPNFQP |
| | | PAKCHVVTKSRDFAEWPIMKASEAIQRYIYALSTTERAACKPGKSSESHAAWFAATGVSN |
| | | HGYSHVQGLNLIFDHTLGRYDGVLKKVQLRNEKARARLESINASRADEGLPEIKAEEEEV |
| | | ATNETGHLLQPPGINPSFYVYQTISPQAYRPRDEIVLPPEYAGYVRDPNAPIPLGVVRNR |
| | | CDIQKGCPGYIPEWQREAGTAISPKTGKAVTVPGLSPKKNKRMRRYWRSEKEKAQDALLV |
| | | TVRIGTDWVVIDVRGLLRNARWRTIAPKDISLNALLDLFTGDPVIDVRRNIVTFTYTLDA |
| | | CGTYARKWTLKGKQTKATLDKLTATQTVALVAIALGQTNPISAGISRVTQENGALQCEPL |
| | | DRFTLPDDLLKDISAYRIAWDRNEEELRARSVEALPEAQQAEVRALDGVSKETARTQLCA |
| | | DFGLDPKRLPWDKMSSNTTFISEALLSNSVSRDQVFFTPAPKKGAKKKAPVEVMRKDRTW |
| | | ARAYKPRLSVEAQKLKNEALWALKRTSPEYLKLSRRKEELCRRSINYVIEKTRRRTQCQI |
| | | VIPVIEDLNVRFFHGSGKRLPGWDNFFTAKKFNRWFIQGLHKAFSDLRTHRSFYVFEVRP |
| | | ERTSITCPKCGHCEVGNRDGEAFQCLSCGKTCNADLDVATHNLTQVALTGKTMPKREEPR |
| | | DAQGTAPARKTKKASKSKAPPAEREDQTPAQEPSQTS |
| 27 | inactive VRER | MDKKYSIGLAIGTNSVGWAVITDEYKVPSKKFKVLGNTDRHSIKKNLIGALLFDSGETAE |
| | SpCas9 | ATRLKRTARRRYTRRKNRICYLQEIFSNEMAKVDDSFFHRLEESFLVEEDKKHERHPIFG |
| | | NIVDEVAYHEKYPTIYHLRKKLVDSTDKADLRLIYLALAHMIKFRGHFLIEGDLNPDNSD |
| | | VDKLFIQLVQTYNQLFEENPINASGVDAKAILSARLSKSRRLENLIAQLPGEKKNGLFGN |
| | | LIALSLGLTPNFKSNFDLAEDAKLQLSKDTYDDDLDNLLAQIGDQYADLFLAAKNLSDAI |
| | | LLSDILRVNTEITKAPLSASMIKRYDEHHQDLTLLKALVRQQLPEKYKEIFFDQSKNGYA |
| | | GYIDGGASQEEFYKFIKPILEKMDGTEELLVKLNREDLLRKQRTFDNGSIPHQIHLGELH |
| | | AILRRQEDFYPFLKDNREKIEKILTFRIPYYVGPLARGNSRFAWMTRKSEETITPWNFEE |
| | | VVDKGASAQSFIERMTNFDKNLPNEKVLPKHSLLYEYFTVYNELTKVKYVTEGMRKPAFL |
| | | SGEQKKAIVDLLFKTNRKVTVKQLKEDYFKKIECFDSVEISGVEDRFNASLGTYHDLLKI |
| | | IKDKDFLDNEENEDILEDIVLTLTLFEDREMIEERLKTYAHLFDDKVMKQLKRRRYTGWG |
| | | RLSRKLINGIRDKQSGKTILDFLKSDGFANRNFMQLIHDDSLTFKEDIQKAQVSGQGDSL |
| | | HEHIANLAGSPAIKKGILQTVKVVDELVKVMGRHKPENIVIEMARENQTTQKGQKNSRER |
| | | MKRIEEGIKELGSQILKEHPVENTQLQNEKLYLYYLQNGRDMYVDQELDINRLSDYDVDA |
| | | IVPQSFLKDDSIDNKVLTRSDKNRGKSDNVPSEEVVKKMKNYWRQLLNAKLITQRKFDNL |
| | | TKAERGGLSELDKAGFIKRQLVETRQITKHVAQILDSRMNTKYDENDKLIREVKVITLKS |
| | | KLVSDFRKDFQFYKVREINNYHHAHDAYLNAVVGTALIKKYPKLESEFVYGDYKVYDVRK |
| | | MIAKSEQEIGKATAKYFFYSNIMNFFKTEITLANGEIRKRPLIETNGETGEIVWDKGRDF |
| | | ATVRKVLSMPQVNIVKKTEVQTGGFSKESILPKRNSDKLIARKKDWDPKKYGGFVSPTVA |
| | | YSVLVVAKVEKGKSKKLKSVKELLGITIMERSSFEKNPIDFLEAKGYKEVKKDLIIKLPK |
| | | YSLFELENGRKRMLASARELQKGNELALPSKYVNFLYLASHYEKLKGSPEDNEQKQLFVE |
| | | QHKHYLDEIIEQISEFSKRVILADANLDKVLSAYNKHRDKPIREQAENIIHLFTLTNLGA |
| | | PAAFKYFDTTIDRKEYRSTKEVLDATLIHQSITGLYETRIDLSQLGGD |
| 28 | inactive EQR | MDKKYSIGLAIGTNSVGWAVITDEYKVPSKKFKVLGNTDRHSIKKNLIGALLFDSGETAE |
| | SpCas9 | ATRLKRTARRRYTRRKNRICYLQEIFSNEMAKVDDSFFHRLEESFLVEEDKKHERHPIFG |
| | | NIVDEVAYHEKYPTIYHLRKKLVDSTDKADLRLIYLALAHMIKFRGHFLIEGDLNPDNSD |
| | | VDKLFIQLVQTYNQLFEENPINASGVDAKAILSARLSKSRRLENLIAQLPGEKKNGLFGN |
| | | LIALSLGLTPNFKSNFDLAEDAKLQLSKDTYDDDLDNLLAQIGDQYADLFLAAKNLSDAI |
| | | LLSDILRVNTEITKAPLSASMIKRYDEHHQDLTLLKALVRQQLPEKYKEIFFDQSKNGYA |
| | | GYIDGGASQEEFYKFIKPILEKMDGTEELLVKLNREDLLRKQRTFDNGSIPHQIHLGELH |
| | | AILRRQEDFYPFLKDNREKIEKILTFRIPYYVGPLARGNSRFAWMTRKSEETITPWNFEE |
| | | VVDKGASAQSFIERMTNFDKNLPNEKVLPKHSLLYEYFTVYNELTKVKYVTEGMRKPAFL |
| | | SGEQKKAIVDLLFKTNRKVTVKQLKEDYFKKIECFDSVEISGVEDRFNASLGTYHDLLKI |
| | | IKDKDFLDNEENEDILEDIVLTLTLFEDREMIEERLKTYAHLFDDKVMKQLKRRRYTGWG |
| | | RLSRKLINGIRDKQSGKTILDFLKSDGFANRNFMQLIHDDSLTFKEDIQKAQVSGQGDSL |
| | | HEHIANLAGSPAIKKGILQTVKVVDELVKVMGRHKPENIVIEMARENQTTQKGQKNSRER |
| | | MKRIEEGIKELGSQILKEHPVENTQLQNEKLYLYYLQNGRDMYVDQELDINRLSDYDVDA |
| | | IVPQSFLKDDSIDNKVLTRSDKNRGKSDNVPSEEVVKKMKNYWRQLLNAKLITQRKFDNL |
| | | TKAERGGLSELDKAGFIKRQLVETRQITKHVAQILDSRMNTKYDENDKLIREVKVITLKS |
| | | KLVSDFRKDFQFYKVREINNYHHAHDAYLNAVVGTALIKKYPKLESEFVYGDYKVYDVRK |
| | | MIAKSEQEIGKATAKYFFYSNIMNFFKTEITLANGEIRKRPLIETNGETGEIVWDKGRDF |
| | | ATVRKVLSMPQVNIVKKTEVQTGGFSKESILPKRNSDKLIARKKDWDPKKYGGFESPTVA |
| | | YSVLVVAKVEKGKSKKLKSVKELLGITIMERSSFEKNPIDFLEAKGYKEVKKDLIIKLPK |
| | | YSLFELENGRKRMLASAGELQKGNELALPSKYVNFLYLASHYEKLKGSPEDNEQKQLFVE |
| | | QHKHYLDEIIEQISEFSKRVILADANLDKVLSAYNKHRDKPIREQAENIIHLFTLTNLGA |
| | | PAAFKYFDTTIDRKQYRSTKEVLDATLIHQSITGLYETRIDLSQLGGD |
| 29 | inactive VQR | MDKKYSIGLAIGTNSVGWAVITDEYKVPSKKFKVLGNTDRHSIKKNLIGALLFDSGETAE |
| | SpCas9 | ATRLKRTARRRYTRRKNRICYLQEIFSNEMAKVDDSFFHRLEESFLVEEDKKHERHPIFG |
| | | NIVDEVAYHEKYPTIYHLRKKLVDSTDKADLRLIYLALAHMIKFRGHFLIEGDLNPDNSD |
| | | VDKLFIQLVQTYNQLFEENPINASGVDAKAILSARLSKSRRLENLIAQLPGEKKNGLFGN |
| | | LIALSLGLTPNFKSNFDLAEDAKLQLSKDTYDDDLDNLLAQIGDQYADLFLAAKNLSDAI |
| | | LLSDILRVNTEITKAPLSASMIKRYDEHHQDLTLLKALVRQQLPEKYKEIFFDQSKNGYA |
| | | GYIDGGASQEEFYKFIKPILEKMDGTEELLVKLNREDLLRKQRTFDNGSIPHQIHLGELH |
| | | AILRRQEDFYPFLKDNREKIEKILTFRIPYYVGPLARGNSRFAWMTRKSEETITPWNFEE |
| | | VVDKGASAQSFIERMTNFDKNLPNEKVLPKHSLLYEYFTVYNELTKVKYVTEGMRKPAFL |
| | | SGEQKKAIVDLLFKTNRKVTVKQLKEDYFKKIECFDSVEISGVEDRFNASLGTYHDLLKI |
| | | IKDKDFLDNEENEDILEDIVLTLTLFEDREMIEERLKTYAHLFDDKVMKQLKRRRYTGWG |
| | | RLSRKLINGIRDKQSGKTILDFLKSDGFANRNFMQLIHDDSLTFKEDIQKAQVSGQGDSL |
| | | HEHIANLAGSPAIKKGILQTVKVVDELVKVMGRHKPENIVIEMARENQTTQKGQKNSRER |
| | | MKRIEEGIKELGSQILKEHPVENTQLQNEKLYLYYLQNGRDMYVDQELDINRLSDYDVDA |
| | | IVPQSFLKDDSIDNKVLTRSDKNRGKSDNVPSEEVVKKMKNYWRQLLNAKLITQRKFDNL |
| | | TKAERGGLSELDKAGFIKRQLVETRQITKHVAQILDSRMNTKYDENDKLIREVKVITLKS |
| | | KLVSDFRKDFQFYKVREINNYHHAHDAYLNAVVGTALIKKYPKLESEFVYGDYKVYDVRK |
| | | MIAKSEQEIGKATAKYFFYSNIMNFFKTEITLANGEIRKRPLIETNGETGEIVWDKGRDF |
| | | ATVRKVLSMPQVNIVKKTEVQTGGFSKESILPKRNSDKLIARKKDWDPKKYGGFVSPTVA |
| | | YSVLVVAKVEKGKSKKLKSVKELLGITIMERSSFEKNPIDFLEAKGYKEVKKDLIIKLPK |
| | | YSLFELENGRKRMLASAGELQKGNELALPSKYVNFLYLASHYEKLKGSPEDNEQKQLFVE |
| | | QHKHYLDEIIEQISEFSKRVILADANLDKVLSAYNKHRDKPIREQAENIIHLFTLTNLGA |
| | | PAAFKYFDTTIDRKQYRSTKEVLDATLIHQSITGLYETRIDLSQLGGD |
| 30 | inactive SPG | MDKKYSIGLAIGTNSVGWAVITDEYKVPSKKFKVLGNTDRHSIKKNLIGALLFDSGETAE |
| | SpCas9 | ATRLKRTARRRYTRRKNRICYLQEIFSNEMAKVDDSFFHRLEESFLVEEDKKHERHPIFG |
| | | NIVDEVAYHEKYPTIYHLRKKLVDSTDKADLRLIYLALAHMIKFRGHFLIEGDLNPDNSD |
| | | VDKLFIQLVQTYNQLFEENPINASGVDAKAILSARLSKSRRLENLIAQLPGEKKNGLFGN |
| | | LIALSLGLTPNFKSNFDLAEDAKLQLSKDTYDDDLDNLLAQIGDQYADLFLAAKNLSDAI |
| | | LLSDILRVNTEITKAPLSASMIKRYDEHHQDLTLLKALVRQQLPEKYKEIFFDQSKNGYA |
| | | GYIDGGASQEEFYKFIKPILEKMDGTEELLVKLNREDLLRKQRTFDNGSIPHQIHLGELH |
| | | AILRRQEDFYPFLKDNREKIEKILTFRIPYYVGPLARGNSRFAWMTRKSEETITPWNFEE |
| | | VVDKGASAQSFIERMTNFDKNLPNEKVLPKHSLLYEYFTVYNELTKVKYVTEGMRKPAFL |
| | | SGEQKKAIVDLLFKTNRKVTVKQLKEDYFKKIECFDSVEISGVEDRFNASLGTYHDLLKI |
| | | IKDKDFLDNEENEDILEDIVLTLTLFEDREMIEERLKTYAHLFDDKVMKQLKRRRYTGWG |
| | | RLSRKLINGIRDKQSGKTILDFLKSDGFANRNFMQLIHDDSLTFKEDIQKAQVSGQGDSL |
| | | HEHIANLAGSPAIKKGILQTVKVVDELVKVMGRHKPENIVIEMARENQTTQKGQKNSRER |
| | | MKRIEEGIKELGSQILKEHPVENTQLQNEKLYLYYLQNGRDMYVDQELDINRLSDYDVDA |
| | | IVPQSFLKDDSIDNKVLTRSDKNRGKSDNVPSEEVVKKMKNYWRQLLNAKLITQRKFDNL |
| | | TKAERGGLSELDKAGFIKRQLVETRQITKHVAQILDSRMNTKYDENDKLIREVKVITLKS |
| | | KLVSDFRKDFQFYKVREINNYHHAHDAYLNAVVGTALIKKYPKLESEFVYGDYKVYDVRK |
| | | MIAKSEQEIGKATAKYFFYSNIMNFFKTEITLANGEIRKRPLIETNGETGEIVWDKGRDF |
| | | ATVRKVLSMPQVNIVKKTEVQTGGFSKESILPKRNSDKLIARKKDWDPKKYGGFLWPTVA |
| | | YSVLVVAKVEKGKSKKLKSVKELLGITIMERSSFEKNPIDFLEAKGYKEVKKDLIIKLPK |
| | | YSLFELENGRKRMLASAKQLQKGNELALPSKYVNFLYLASHYEKLKGSPEDNEQKQLFVE |
| | | QHKHYLDEIIEQISEFSKRVILADANLDKVLSAYNKHRDKPIREQAENIIHLFTLTNLGA |
| | | PAAFKYFDTTIDRKQYRSTKEVLDATLIHQSITGLYETRIDLSQLGGD |
| 31 | inactive SpRY | MDKKYSIGLAIGTNSVGWAVITDEYKVPSKKFKVLGNTDRHSIKKNLIGALLFDSGETAE |
| | Cas9 | RTRLKRTARRRYTRRKNRICYLQEIFSNEMAKVDDSFFHRLEESFLVEEDKKHERHPIFG |
| | | NIVDEVAYHEKYPTIYHLRKKLVDSTDKADLRLIYLALAHMIKFRGHFLIEGDLNPDNSD |
| | | VDKLFIQLVQTYNQLFEENPINASGVDAKAILSARLSKSRRLENLIAQLPGEKKNGLFGN |
| | | LIALSLGLTPNFKSNFDLAEDAKLQLSKDTYDDDLDNLLAQIGDQYADLFLAAKNLSDAI |
| | | LLSDILRVNTEITKAPLSASMIKRYDEHHQDLTLLKALVRQQLPEKYKEIFFDQSKNGYA |
| | | GYIDGGASQEEFYKFIKPILEKMDGTEELLVKLNREDLLRKQRTFDNGSIPHQIHLGELH |
| | | AILRRQEDFYPFLKDNREKIEKILTFRIPYYVGPLARGNSRFAWMTRKSEETITPWNFEE |
| | | VVDKGASAQSFIERMTNFDKNLPNEKVLPKHSLLYEYFTVYNELTKVKYVTEGMRKPAFL |
| | | SGEQKKAIVDLLFKTNRKVTVKQLKEDYFKKIECFDSVEISGVEDRFNASLGTYHDLLKI |
| | | IKDKDFLDNEENEDILEDIVLTLTLFEDREMIEERLKTYAHLFDDKVMKQLKRRRYTGWG |
| | | RLSRKLINGIRDKQSGKTILDFLKSDGFANRNFMQLIHDDSLTFKEDIQKAQVSGQGDSL |
| | | HEHIANLAGSPAIKKGILQTVKVVDELVKVMGRHKPENIVIEMARENQTTQKGQKNSRER |
| | | MKRIEEGIKELGSQILKEHPVENTQLQNEKLYLYYLQNGRDMYVDQELDINRLSDYDVDA |
| | | IVPQSFLKDDSIDNKVLTRSDKNRGKSDNVPSEEVVKKMKNYWRQLLNAKLITQRKFDNL |
| | | TKAERGGLSELDKAGFIKRQLVETRQITKHVAQILDSRMNTKYDENDKLIREVKVITLKS |
| | | KLVSDFRKDFQFYKVREINNYHHAHDAYLNAVVGTALIKKYPKLESEFVYGDYKVYDVRK |
| | | MIAKSEQEIGKATAKYFFYSNIMNFFKTEITLANGEIRKRPLIETNGETGEIVWDKGRDF |
| | | ATVRKVLSMPQVNIVKKTEVQTGGFSKESIRPKRNSDKLIARKKDWDPKKYGGFLWPTVA |
| | | YSVLVVAKVEKGKSKKLKSVKELLGITIMERSSFEKNPIDFLEAKGYKEVKKDLIIKLPK |
| | | YSLFELENGRKRMLASAKQLQKGNELALPSKYVNFLYLASHYEKLKGSPEDNEQKQLFVE |
| | | QHKHYLDEIIEQISEFSKRVILADANLDKVLSAYNKHRDKPIREQAENIIHLFTLTRLGA |
| | | PRAFKYFDTTIDPKQYRSTKEVLDATLIHQSITGLYETRIDLSQLGGD |
| 32 | inactive KKH | MKRNYILGLAIGITSVGYGIIDYETRDVIDAGVRLFKEANVENNEGRRSKRGARRLKRRR |
| | dSaCas9 | RHRIQRVKKLLFDYNLLTDHSELSGINPYEARVKGLSQKLSEEEFSAALLHLAKRRGVHN |
| | | VNEVEEDTGNELSTKEQISRNSKALEEKYVAELQLERLKKDGEVRGSINRFKTSDYVKEA |
| | | KQLLKVQKAYHQLDQSFIDTYIDLLETRRTYYEGPGEGSPFGWKDIKEWYEMLMGHCTYF |
| | | PEELRSVKYAYNADLYNALNDLNNLVITRDENEKLEYYEKFQIIENVFKQKKKPTLKQIA |
| | | KEILVNEEDIKGYRVTSTGKPEFTNLKVYHDIKDITARKEIIENAELLDQIAKILTIYQS |
| | | SEDIQEELTNLNSELTQEEIEQISNLKGYTGTHNLSLKAINLILDELWHTNDNQIAIFNR |
| | | LKLVPKKVDLSQQKEIPTTLVDDFILSPVVKRSFIQSIKVINAIIKKYGLPNDIIIELAR |
| | | EKNSKDAQKMINEMQKRNRQTNERIEEIIRTTGKENAKYLIEKIKLHDMQEGKCLYSLEA |
| | | IPLEDLLNNPFNYEVDHIIPRSVSFDNSFNNKVLVKQEEASKKGNRTPFQYLSSSDSKIS |
| | | YETFKKHILNLAKGKGRISKTKKEYLLEERDINRFSVQKDFINRNLVDTRYATRGLMNLL |
| | | RSYFRVNNLDVKVKSINGGFTSFLRRKWKFKKERNKGYKHHAEDALIIANADFIFKEWKK |
| | | LDKAKKVMENQMFEEKQAESMPEIETEQEYKEIFITPHQIKHIKDFKDYKYSHRVDKKPN |
| | | RKLINDTLYSTRKDDKGNTLIVNNLNGLYDKDNDKLKKLINKSPEKLLMYHHDPQTYQKL |
| | | KLIMEQYGDEKNPLYKYYEETGNYLTKYSKKDNGPVIKKIKYYGNKLNAHLDITDDYPNS |
| | | RNKVVKLSLKPYRFDVYLDNGVYKFVTVKNLDVIKKENYYEVNSKCYEEAKKLKKISNQA |
| | | EFIASFYKNDLIKINGELYRVIGVNNDLLNRIEVNMIDITYREYLENMNDKRPPHIIKTI |
| | | ASKTQSIKKYSTDILGNLYEVKSKKHPQIIKKG |
| 33 | mRNA0001 | SRPGERPFQCRICMRNFSKKFNLLQHTRTHTGEKPFQCRICMRNFSRQDNLNSHLRTHTG |
| | | SQKPFQCRICMRNFSRSHNLKLHTRTHTGEKPFQCRICMRNFSQSTTLKRHLRTHTGSQK |
| | | PFQCRICMRNFSRNTNLTRHTRTHTGEKPFQCRICMRNFSIKHNLARHLRTHLRGS |
| 34 | mRNA0002 | SRPGERPFQCRICMRNFSKKFNLLQHTRTHTGEKPFQCRICMRNFSRKDYLISHLRTHTG |
| | | SQKPFQCRICMRNFSRSHNLKLHTRTHTGEKPFQCRICMRNFSQSTTLKRHLRTHTGSQK |
| | | PFQCRICMRNFSRQDNLGRHLRTHTGEKPFQCRICMRNFSVVNNLNRHLKTHLRGS |
| 35 | mRNA0003 | SRPGERPFQCRICMRNFSKKFNLLQHTRTHTGEKPFQCRICMRNFSRKDYLISHLRTHTG |
| | | SQKPFQCRICMRNFSRSHNLRLHTRTHTGEKPFQCRICMRNFSQSTTLKRHLRTHTGSQK |
| | | PFQCRICMRNFSRQDNLGRHLRTHTGEKPFQCRICMRNFSVVNNLNRHLKTHLRGS |
| 36 | mRNA0004 | SRPGERPFQCRICMRNFSRRHILDRHTRTHTGEKPFQCRICMRNFSRQDNLGRHLRTHTG |
| | | SQKPFQCRICMRNFSQSTTLKRHLRTHTGEKPFQCRICMRNFSRRDGLAGHLKTHTGSQK |
| | | PFQCRICMRNFSVHHNLVRHLRTHTGEKPFQCRICMRNFSISHNLARHLKTHLRGS |
| 37 | mRNA0005 | SRPGERPFQCRICMRNFSRREVLENHLRTHTGEKPFQCRICMRNFSRRDNLNRHLKTHTG |
| | | SQKPFQCRICMRNFSQSTTLKRHLRTHTGEKPFQCRICMRNFSRRDGLAGHLKTHTGSQK |
| | | PFQCRICMRNFSVHHNLVRHLRTHTGEKPFQCRICMRNFSISHNLARHLKTHLRGS |
| 38 | mRNA0006 | SRPGERPFQCRICMRNFSRRAVLDRHTRTHTGEKPFQCRICMRNFSRQDNLGRHLRTHTG |
| | | SQKPFQCRICMRNFSQSTTLKRHLRTHTGEKPFQCRICMRNFSRRDGLAGHLKTHTGSQK |
| | | PFQCRICMRNFSVHHNLVRHLRTHTGEKPFQCRICMRNFSISHNLARHLKTHLRGS |
| 39 | mRNA0064 | SRPGERPFQCRICMRNFSRQEHLVRHLRTHTGEKPFQCRICMRNFSEGGNLMRHLKTHTG |
| | | SQKPFQCRICMRNFSSDRRDLDHTRTHTGEKPFQCRICMRNFSSFQSYLEHLRTHTGSQK |
| | | PFQCRICMRNFSRPNHLAIHTRTHTGEKPFQCRICMRNFSQSPHLKRHLRTHLRGS |
| 40 | mRNA0007 | SRPGERPFQCRICMRNFSRREHLVRHLRTHTGEKPFQCRICMRNFSDPSNLQRHLKTHTG |
| | | SQKPFQCRICMRNFSSDRRDLDHTRTHTGEKPFQCRICMRNFSSFQSYLEHLRTHTGSQK |
| | | PFQCRICMRNFSRPNHLAIHTRTHTGEKPFQCRICMRNFSQSPHLKRHLRTHLRGS |
| 41 | mRNA0008 | SRPGERPFQCRICMRNFSRREHLVRHLRTHTGEKPFQCRICMRNFSDMGNLGRHLKTHTG |
| | | SQKPFQCRICMRNFSSDRRDLDHTRTHTGEKPFQCRICMRNFSSFQSYLEHLRTHTGSQK |
| | | PFQCRICMRNFSRPNHLAIHTRTHTGEKPFQCRICMRNFSQSPHLKRHLRTHLRGS |
| 42 | mRNA0009 | SRPGERPFQCRICMRNFSKKDHLHRHTRTHTGEKPFQCRICMRNFSQKEILTRHLRTHTG |
| | | SQKPFQCRICMRNFSQSAHLKRHLRTHTGEKPFQCRICMRNFSETGSLRRHLKTHTGGGG |
| | | SQKPFQCRICMRNFSQSHSLKSHLRTHTGEKPFQCRICMRNFSESGHLKRHLKTHLRGS |
| 43 | mRNA0010 | SRPGERPFQCRICMRNFSKKDHLHRHTRTHTGEKPFQCRICMRNFSQKEILTRHLRTHTG |
| | | SQKPFQCRICMRNFSQSAHLKRHLRTHTGEKPFQCRICMRNFSDRTPLNRHLKTHTGGGG |
| | | SQKPFQCRICMRNFSQSHSLKSHLRTHTGEKPFQCRICMRNFSESGHLKRHLKTHLRGS |
| 44 | mRNA0011 | SRPGERPFQCRICMRNFSKTDHLARHTRTHTGEKPFQCRICMRNFSQKEILTRHLRTHTG |
| | | SQKPFQCRICMRNFSQSAHLKRHLRTHTGEKPFQCRICMRNFSETGSLRRHLKTHTGGGG |
| | | SQKPFQCRICMRNFSQKHHLVTHLRTHTGEKPFQCRICMRNFSENSKLRRHLKTHLRGS |
| 45 | mRNA0012 | SRPGERPFQCRICMRNFSQAGNLVRHLRTHTGEKPFQCRICMRNFSQNSHLRRHLKTHTG |
| | | GGGSQKPFQCRICMRNFSDLSTLRRHTRTHTGEKPFQCRICMRNFSQNEHLKVHLRTHTG |
| | | SQKPFQCRICMRNFSGGTALRMHTRTHTGEKPFQCRICMRNFSQRSSLVRHLRTHLRGS |
| 46 | mRNA0013 | SRPGERPFQCRICMRNFSQRGNLQRHLRTHTGEKPFQCRICMRNFSQTTHLSRHLKTHTG |
| | | GGGSQKPFQCRICMRNFSDGSTLRRHTRTHTGEKPFQCRICMRNFSQKTHLAVHLRTHTG |
| | | SQKPFQCRICMRNFSGGTALRMHTRTHTGEKPFQCRICMRNFSQRSSLVRHLRTHLRGS |
| 47 | mRNA0014 | SRPGERPFQCRICMRNFSQRGNLQRHLRTHTGEKPFQCRICMRNFSQTTHLSRHLKTHTG |
| | | GGGSQKPFQCRICMRNFSDLSTLRRHTRTHTGEKPFQCRICMRNFSQNEHLKVHLRTHTG |
| | | SQKPFQCRICMRNFSGGSALSMHTRTHTGEKPFQCRICMRNFSQRSSLVRHLRTHLRGS |
| 48 | mRNA0015 | SRPGERPFQCRICMRNFSDRGNLTRHLRTHTGEKPFQCRICMRNFSQARSLRAHLKTHTG |
| | | GGGSQKPFQCRICMRNFSEKASLIKHTRTHTGEKPFQCRICMRNFSDHSSLKRHLRTHTG |
| | | SQKPFQCRICMRNFSRRFILSRHTRTHTGEKPFQCRICMRNFSRNDSLKCHLRTHLRGS |
| 49 | mRNA0016 | SRPGERPFQCRICMRNFSDRGNLTRHLRTHTGEKPFQCRICMRNFSQARSLRAHLKTHTG |
| | | GGGSQKPFQCRICMRNFSDKSSLRKHTRTHTGEKPFQCRICMRNFSDHSSLKRHLRTHTG |
| | | SQKPFQCRICMRNFSRNFILQRHTRTHTGEKPFQCRICMRNFSRNDTLIIHLRTHLRGS |
| 50 | mRNA0017 | SRPGERPFQCRICMRNFSDRGNLTRHLRTHTGEKPFQCRICMRNFSQARSLRAHLKTHTG |
| | | GGGSQKPFQCRICMRNFSCNGSLKKHTRTHTGEKPFQCRICMRNFSDHSSLKRHLRTHTG |
| | | SQKPFQCRICMRNFSRNFILQRHTRTHTGEKPFQCRICMRNFSRNDTLIIHLRTHLRGS |
| 51 | mRNA0018 | SRPGERPFQCRICMRNFSRTDTLARHLRTHTGEKPFQCRICMRNFSRTDSLPRHLKTHTG |
| | | GGGSQKPFQCRICMRNFSDHSSLKRHLRTHTGEKPFQCRICMRNFSQPHGLAHHLKTHTG |
| | | SQKPFQCRICMRNFSQSAHLKRHLRTHTGEKPFQCRICMRNFSVGNSLSRHLKTHLRGS |
| 52 | mRNA0019 | SRPGERPFQCRICMRNFSRTDTLARHLRTHTGEKPFQCRICMRNFSRTDSLPRHLKTHTG |
| | | GGGSQKPFQCRICMRNFSDHSSLKRHLRTHTGEKPFQCRICMRNFSQPHGLRHHLKTHTG |
| | | SQKPFQCRICMRNFSQSAHLKRHLRTHTGEKPFQCRICMRNFSVGNSLSRHLKTHLRGS |
| 53 | mRNA0020 | SRPGERPFQCRICMRNFSRTDTLARHLRTHTGEKPFQCRICMRNFSRLDMLARHLKTHTG |
| | | GGGSQKPFQCRICMRNFSDHSSLKRHLRTHTGEKPFQCRICMRNFSQPHGLSTHLKTHTG |
| | | SQKPFQCRICMRNFSQQAHLVRHTRTHTGEKPFQCRICMRNFSVHESLKRHLRTHLRGS |
| 54 | mRNA0021 | SRPGERPFQCRICMRNFSRADNLGRHLRTHTGEKPFQCRICMRNFSRNTHLSYHLKTHTG |
| | | SQKPFQCRICMRNFSRGDGLRRHLRTHTGEKPFQCRICMRNFSRRDNLNRHLKTHTGSQK |
| | | PFQCRICMRNFSRARNLTLHTRTHTGEKPFQCRICMRNFSDPSSLKRHLRTHLRGS |
| 55 | mRNA0022 | SRPGERPFQCRICMRNFSRADNLGRHLRTHTGEKPFQCRICMRNFSRNTHLSYHLKTHTG |
| | | SQKPFQCRICMRNFSRKLGLLRHTRTHTGEKPFQCRICMRNFSRQDNLGRHLRTHTGSQK |
| | | PFQCRICMRNFSRARNLTLHTRTHTGEKPFQCRICMRNFSDPSSLKRHLRTHLRGS |
| 56 | mRNA0023 | SRPGERPFQCRICMRNFSRADNLGRHLRTHTGEKPFQCRICMRNFSRNTHLSYHLKTHTG |
| | | SQKPFQCRICMRNFSRKLGLLRHTRTHTGEKPFQCRICMRNFSRQDNLGRHLRTHTGSQK |
| | | PFQCRICMRNFSRRRNLQLHTRTHTGEKPFQCRICMRNFSDHSSLKRHLRTHLRGS |
| 57 | mRNA0024 | SRPGERPFQCRICMRNFSQQSSLLRHTRTHTGEKPFQCRICMRNFSRREHLVRHLRTHTG |
| | | SQKPFQCRICMRNFSGLTALRTHTRTHTGEKPFQCRICMRNFSERAKLIRHLRTHTGGGG |
| | | SQKPFQCRICMRNFSAKRDLDRHTRTHTGEKPFQCRICMRNFSVNSSLTRHLRTHLRGS |
| 58 | mRNA0025 | SRPGERPFQCRICMRNFSQQSSLLRHTRTHTGEKPFQCRICMRNFSRREHLVRHLRTHTG |
| | | SQKPFQCRICMRNFSGLTALRTHTRTHTGEKPFQCRICMRNFSERAKLIRHLRTHTGGGG |
| | | SQKPFQCRICMRNFSLRKDLVRHTRTHTGEKPFQCRICMRNFSVRHSLTRHLRTHLRGS |
| 59 | mRNA0026 | SRPGERPFQCRICMRNFSQASALSRHTRTHTGEKPFQCRICMRNFSRREHLVRHLRTHTG |
| | | SQKPFQCRICMRNFSGLTALRTHTRTHTGEKPFQCRICMRNFSERAKLIRHLRTHTGGGG |
| | | SQKPFQCRICMRNFSAKRDLDRHTRTHTGEKPFQCRICMRNFSVNSSLTRHLRTHLRGS |
| 60 | mRNA0061 | SRPGERPFQCRICMRNFSRGRNLEMHTRTHTGEKPFQCRICMRNFSDSSVLRRHLRTHTG |
| | | GGGSQKPFQCRICMRNFSQNANLKRHTRTHTGEKPFQCRICMRNFSQKHHLAVHLRTHTG |
| | | SQKPFQCRICMRNFSQRSNLARHLRTHTGEKPFQCRICMRNFSQKVHLEAHLKTHLRGS |
| 61 | mRNA0027 | SRPGERPFQCRICMRNFSRRRNLDVHTRTHTGEKPFQCRICMRNFSDSSVLRRHLRTHTG |
| | | GGGSQKPFQCRICMRNFSQNANLKRHTRTHTGEKPFQCRICMRNFSQKHHLAVHLRTHTG |
| | | SQKPFQCRICMRNFSQRSNLARHLRTHTGEKPFQCRICMRNFSQKVHLEAHLKTHLRGS |
| 62 | mRNA0065 | SRPGERPFQCRICMRNFSRGRNLAIHTRTHTGEKPFQCRICMRNFSDSSVLRRHLRTHTG |
| | | GGGSQKPFQCRICMRNFSLKSNLHRHTRTHTGEKPFQCRICMRNFSLKQHLVVHLRTHTG |
| | | SQKPFQCRICMRNFSLKTNLARHTRTHTGEKPFQCRICMRNFSQKCHLKAHLRTHLRGS |
| 63 | mRNA0028 | SRPGERPFQCRICMRNFSDGSNLRRHLRTHTGEKPFQCRICMRNFSRIDNLDGHLKTHTG |
| | | SQKPFQCRICMRNFSQRRYLVEHTRTHTGEKPFQCRICMRNFSQQTNLARHLRTHTGGGG |
| | | SQKPFQCRICMRNFSQRSDLTRHLRTHTGEKPFQCRICMRNFSRGDNLNRHLKTHLRGS |
| 64 | mRNA0029 | SRPGERPFQCRICMRNFSDPSNLQRHLRTHTGEKPFQCRICMRNFSRRDNLPKHLKTHTG |
| | | SQKPFQCRICMRNFSTTFNLRVHTRTHTGEKPFQCRICMRNFSQTQNLTRHLRTHTGGGG |
| | | SQKPFQCRICMRNFSHKETLNRHLRTHTGEKPFQCRICMRNFSREDNLGRHLKTHLRGS |
| 65 | mRNA0030 | SRPGERPFQCRICMRNFSDPSNLQRHLRTHTGEKPFQCRICMRNFSRRDNLPKHLKTHTG |
| | | SQKPFQCRICMRNFSQRRYLVEHTRTHTGEKPFQCRICMRNFSQQTNLARHLRTHTGGGG |
| | | SQKPFQCRICMRNFSQRSDLTRHLRTHTGEKPFQCRICMRNFSRGDNLNRHLKTHLRGS |
| 66 | mRNA0031 | SRPGERPFQCRICMRNFSQQTNLTRHLRTHTGEKPFQCRICMRNFSANRTLVHHLKTHTG |
| | | SQKPFQCRICMRNFSEEANLRRHTRTHTGEKPFQCRICMRNFSRGEHLTRHLRTHTGSQK |
| | | PFQCRICMRNFSTNSSLTRHLRTHTGEKPFQCRICMRNFSRIDNLIRHLKTHLRGS |
| 67 | mRNA0032 | SRPGERPFQCRICMRNFSQQTNLTRHLRTHTGEKPFQCRICMRNFSANRTLVHHLKTHTG |
| | | SQKPFQCRICMRNFSEEANLRRHTRTHTGEKPFQCRICMRNFSRREHLVRHLRTHTGSQK |
| | | PFQCRICMRNFSMTSSLRRHTRTHTGEKPFQCRICMRNFSRQDNLGRHLRTHLRGS |
| 68 | mRNA0033 | SRPGERPFQCRICMRNFSQQTNLTRHLRTHTGEKPFQCRICMRNFSANRTLVHHLKTHTG |
| | | SQKPFQCRICMRNFSEEANLRRHTRTHTGEKPFQCRICMRNFSRGEHLTRHLRTHTGSQK |
| | | PFQCRICMRNFSMTSSLRRHTRTHTGEKPFQCRICMRNFSRQDNLGRHLRTHLRGS |
| 69 | mRNA0034 | SRPGERPFQCRICMRNFSRATHLTRHTRTHTGEKPFQCRICMRNFSRADVLKGHLRTHTG |
| | | SQKPFQCRICMRNFSQRSSLVRHLRTHTGEKPFQCRICMRNFSRKDALHVHLKTHTGSQK |
| | | PFQCRICMRNFSVHHNLVRHLRTHTGEKPFQCRICMRNFSISHNLARHLKTHLRGS |
| 70 | mRNA0035 | SRPGERPFQCRICMRNFSRATHLTRHTRTHTGEKPFQCRICMRNFSRADVLKGHLRTHTG |
| | | SQKPFQCRICMRNFSQSSSLVRHLRTHTGEKPFQCRICMRNFSRKERLATHLKTHTGSQK |
| | | PFQCRICMRNFSVRHNLTRHLRTHTGEKPFQCRICMRNFSISHNLARHLKTHLRGS |
| 71 | mRNA0036 | SRPGERPFQCRICMRNFSKKDHLHRHTRTHTGEKPFQCRICMRNFSRKESLTVHLRTHTG |
| | | SQKPFQCRICMRNFSQSSSLVRHLRTHTGEKPFQCRICMRNFSRKERLATHLKTHTGSQK |
| | | PFQCRICMRNFSVHHNLVRHLRTHTGEKPFQCRICMRNFSISHNLARHLKTHLRGS |
| 72 | mRNA0037 | SRPGERPFQCRICMRNFSRVDHLHRHLRTHTGEKPFQCRICMRNFSRREHLSGHLKTHTG |
| | | GGGSQKPFQCRICMRNFSQSSSLVRHLRTHTGEKPFQCRICMRNFSRKERLATHLKTHTG |
| | | SQKPFQCRICMRNFSVAHNLTRHLRTHTGEKPFQCRICMRNFSISHNLARHLKTHLRGS |
| 73 | mRNA0038 | SRPGERPFQCRICMRNFSRKHHLGRHTRTHTGEKPFQCRICMRNFSRREHLTIHLRTHTG |
| | | GGGSQKPFQCRICMRNFSQSSSLVRHLRTHTGEKPFQCRICMRNFSRKERLATHLKTHTG |
| | | SQKPFQCRICMRNFSVAHNLTRHLRTHTGEKPFQCRICMRNFSISHNLARHLKTHLRGS |
| 74 | mRNA0039 | SRPGERPFQCRICMRNFSRVDHLHRHLRTHTGEKPFQCRICMRNFSRSDHLSLHLKTHTG |
| | | GGGSQKPFQCRICMRNFSQSSSLVRHLRTHTGEKPFQCRICMRNFSRKERLATHLKTHTG |
| | | SQKPFQCRICMRNFSVAHNLTRHLRTHTGEKPFQCRICMRNFSISHNLARHLKTHLRGS |
| 75 | mRNA0040 | SRPGERPFQCRICMRNFSKTDHLARHTRTHTGEKPFQCRICMRNFSQKEILTRHLRTHTG |
| | | SQKPFQCRICMRNFSQSAHLKRHLRTHTGEKPFQCRICMRNFSETGSLRRHLKTHTGSQK |
| | | PFQCRICMRNFSQSSSLVRHLRTHTGEKPFQCRICMRNFSQTNTLGRHLKTHLRGS |
| 76 | mRNA0041 | SRPGERPFQCRICMRNFSKKDHLHRHTRTHTGEKPFQCRICMRNFSQKEILTRHLRTHTG |
| | | SQKPFQCRICMRNFSQSAHLKRHLRTHTGEKPFQCRICMRNFSETGSLRRHLKTHTGSQK |
| | | PFQCRICMRNFSQSSSLVRHLRTHTGEKPFQCRICMRNFSQGGTLRRHLKTHLRGS |
| 77 | mRNA0042 | SRPGERPFQCRICMRNFSKKDHLHRHTRTHTGEKPFQCRICMRNFSQKEILTRHLRTHTG |
| | | SQKPFQCRICMRNFSQSAHLKRHLRTHTGEKPFQCRICMRNFSDPTSLNRHLKTHTGSQK |
| | | PFQCRICMRNFSQSSSLVRHLRTHTGEKPFQCRICMRNFSQTNTLGRHLKTHLRGS |
| 78 | mRNA0043 | SRPGERPFQCRICMRNFSQQTNLTRHLRTHTGEKPFQCRICMRNFSVGGNLARHLKTHTG |
| | | SQKPFQCRICMRNFSKRYNLYQHTRTHTGEKPFQCRICMRNFSRQDNLNTHLRTHTGSQK |
| | | PFQCRICMRNFSRSHNLKLHTRTHTGEKPFQCRICMRNFSQSTTLKRHLRTHLRGS |
| 79 | mRNA0044 | SRPGERPFQCRICMRNFSQQTNLTRHLRTHTGEKPFQCRICMRNFSVGGNLSRHLKTHTG |
| | | SQKPFQCRICMRNFSKRYNLYQHTRTHTGEKPFQCRICMRNFSRQDNLNTHLRTHTGSQK |
| | | PFQCRICMRNFSRSHNLRLHTRTHTGEKPFQCRICMRNFSQSTTLKRHLRTHLRGS |
| 80 | mRNA0045 | SRPGERPFQCRICMRNFSQQTNLTRHLRTHTGEKPFQCRICMRNFSVGGNLSRHLKTHTG |
| | | SQKPFQCRICMRNFSKKENLLQHTRTHTGEKPFQCRICMRNFSRRDNLKSHLRTHTGSQK |
| | | PFQCRICMRNFSRSHNLKLHTRTHTGEKPFQCRICMRNFSQSTTLKRHLRTHLRGS |
| 81 | mRNA0046 | SRPGERPFQCRICMRNFSDKSSLRKHTRTHTGEKPFQCRICMRNFSDHSSLKRHLRTHTG |
| | | SQKPFQCRICMRNFSRNFILQRHTRTHTGEKPFQCRICMRNFSRNDTLIIHLRTHTGGGG |
| | | SQKPFQCRICMRNFSTSTLLKRHTRTHTGEKPFQCRICMRNFSLKEHLTRHLRTHLRGS |
| 82 | mRNA0047 | SRPGERPFQCRICMRNFSCNGSLKKHTRTHTGEKPFQCRICMRNFSDHSSLKRHLRTHTG |
| | | SQKPFQCRICMRNFSRNFILARHTRTHTGEKPFQCRICMRNFSRQDILVVHLRTHTGGGG |
| | | SQKPFQCRICMRNFSHKSSLTRHLRTHTGEKPFQCRICMRNFSESGHLKRHLKTHLRGS |
| 83 | mRNA0048 | SRPGERPFQCRICMRNFSCNGSLKKHTRTHTGEKPFQCRICMRNFSDHSSLKRHLRTHTG |
| | | SQKPFQCRICMRNFSRNFILARHTRTHTGEKPFQCRICMRNFSRQDILVVHLRTHTGGGG |
| | | SQKPFQCRICMRNFSTSTLLKRHTRTHTGEKPFQCRICMRNFSLKEHLTRHLRTHLRGS |
| 84 | mRNA0049 | SRPGERPFQCRICMRNFSTNNNLARHTRTHTGEKPFQCRICMRNFSRTDSLTLHLRTHTG |
| | | SQKPFQCRICMRNFSQREHLTTHLRTHTGEKPFQCRICMRNFSRRDNLNRHLKTHTGSQK |
| | | PFQCRICMRNFSRRQKLTIHTRTHTGEKPFQCRICMRNFSHKSSLTRHLRTHLRGS |
| 85 | mRNA0050 | SRPGERPFQCRICMRNFSTNNNLARHTRTHTGEKPFQCRICMRNFSRTDSLTLHLRTHTG |
| | | SQKPFQCRICMRNFSQREHLTTHLRTHTGEKPFQCRICMRNFSRGDNLKRHLKTHTGSQK |
| | | PFQCRICMRNFSRRQKLTIHTRTHTGEKPFQCRICMRNFSHKSSLTRHLRTHLRGS |
| 86 | mRNA0066 | SRPGERPFQCRICMRNFSTNNNLARHTRTHTGEKPFQCRICMRNFSRTDSLTLHLRTHTG |
| | | SQKPFQCRICMRNFSQREHLNGHLRTHTGEKPFQCRICMRNFSRGDNLARHLKTHTGSQK |
| | | PFQCRICMRNFSRRQKLTIHTRTHTGEKPFQCRICMRNFSHKSSLTRHLRTHLRGS |
| 87 | mRNA0051 | SRPGERPFQCRICMRNFSQQTNLTRHLRTHTGEKPFQCRICMRNFSANRTLVHHLKTHTG |
| | | SQKPFQCRICMRNFSDPANLRRHTRTHTGEKPFQCRICMRNFSRQEHLVRHLRTHTGGGG |
| | | SQKPFQCRICMRNFSMKHHLGRHLRTHTGEKPFQCRICMRNFSQNSHLRRHLKTHLRGS |
| 88 | mRNA0052 | SRPGERPFQCRICMRNFSQQTNLTRHLRTHTGEKPFQCRICMRNFSANRTLVHHLKTHTG |
| | | SQKPFQCRICMRNFSEEANLRRHTRTHTGEKPFQCRICMRNFSRREHLVRHLRTHTGGGG |
| | | SQKPFQCRICMRNFSMKHHLGRHLRTHTGEKPFQCRICMRNFSQNSHLRRHLKTHLRGS |
| 89 | mRNA0067 | SRPGERPFQCRICMRNFSQQTNLTRHLRTHTGEKPFQCRICMRNFSANRTLVHHLKTHTG |
| | | SQKPFQCRICMRNFSDPANLRRHTRTHTGEKPFQCRICMRNFSRQEHLVRHLRTHTGGGG |
| | | SQKPFQCRICMRNFSLKQHLVRHLRTHTGEKPFQCRICMRNFSQGGHLARHLKTHLRGS |
| 90 | mRNA0068 | SRPGERPFQCRICMRNFSRNTHLARHTRTHTGEKPFQCRICMRNFSRADVLKGHLRTHTG |
| | | SQKPFQCRICMRNFSQRSSLVRHLRTHTGEKPFQCRICMRNFSRKDALHVHLKTHTGGGG |
| | | SQKPFQCRICMRNFSQNEHLKVHLRTHTGEKPFQCRICMRNFSQNSHLRRHLKTHLRGS |
| 91 | mRNA0053 | SRPGERPFQCRICMRNFSRNTHLARHTRTHTGEKPFQCRICMRNFSRADVLKGHLRTHTG |
| | | SQKPFQCRICMRNFSQSSSLVRHLRTHTGEKPFQCRICMRNFSRKERLATHLKTHTGGGG |
| | | SQKPFQCRICMRNFSQKTHLAVHLRTHTGEKPFQCRICMRNFSQGGHLKRHLKTHLRGS |
| 92 | mRNA0054 | SRPGERPFQCRICMRNFSRNTHLARHTRTHTGEKPFQCRICMRNFSRADVLKGHLRTHTG |
| | | SQKPFQCRICMRNFSQSSSLVRHLRTHTGEKPFQCRICMRNFSRKERLATHLKTHTGGGG |
| | | SQKPFQCRICMRNFSQKTHLAVHLRTHTGEKPFQCRICMRNFSQNSHLRRHLKTHLRGS |
| 93 | mRNA0055 | SRPGERPFQCRICMRNFSHKSSLTRHLRTHTGEKPFQCRICMRNFSESGHLKRHLKTHTG |
| | | SQKPFQCRICMRNFSRRRNLTLHTRTHTGEKPFQCRICMRNFSDRSSLKRHLRTHTGSQK |
| | | PFQCRICMRNFSQPHSLAVHLRTHTGEKPFQCRICMRNFSQKPHLSRHLKTHLRGS |
| 94 | mRNA0056 | SRPGERPFQCRICMRNFSHKSSLTRHLRTHTGEKPFQCRICMRNFSEGGHLKRHLKTHTG |
| | | SQKPFQCRICMRNFSRRRNLQLHTRTHTGEKPFQCRICMRNFSDHSSLKRHLRTHTGSQK |
| | | PFQCRICMRNFSRRQHLQYHTRTHTGEKPFQCRICMRNFSQSAHLKRHLRTHLRGS |
| 95 | mRNA0057 | SRPGERPFQCRICMRNFSHKSSLTRHLRTHTGEKPFQCRICMRNFSEGGHLKRHLKTHTG |
| | | SQKPFQCRICMRNFSRRRNLTLHTRTHTGEKPFQCRICMRNFSDRSSLKRHLRTHTGSQK |
| | | PFQCRICMRNFSRRQHLQYHTRTHTGEKPFQCRICMRNFSQSAHLKRHLRTHLRGS |
| 96 | mRNA0058 | SRPGERPFQCRICMRNFSGHTALRNHTRTHTGEKPFQCRICMRNFSQSGTLHRHLRTHTG |
| | | GGGSQKPFQCRICMRNFSDHSSLKRHLRTHTGEKPFQCRICMRNFSAMRSLMGHLKTHTG |
| | | SQKPFQCRICMRNFSRRSRLVRHTRTHTGEKPFQCRICMRNFSRGEHLTRHLRTHLRGS |
| 97 | mRNA0059 | SRPGERPFQCRICMRNFSGHTALRNHTRTHTGEKPFQCRICMRNFSQSTTLKRHLRTHTG |
| | | GGGSQKPFQCRICMRNFSDHSSLKRHLRTHTGEKPFQCRICMRNFSQQRSLVGHLKTHTG |
| | | SQKPFQCRICMRNFSEAHHLSRHLRTHTGEKPFQCRICMRNFSRTEHLARHLKTHLRGS |
| 98 | mRNA0060 | SRPGERPFQCRICMRNFSGHTALRNHTRTHTGEKPFQCRICMRNFSQSTTLKRHLRTHTG |
| | | GGGSQKPFQCRICMRNFSDHSSLKRHLRTHTGEKPFQCRICMRNFSAMRSLMGHLKTHTG |
| | | SQKPFQCRICMRNFSRQSRLQRHTRTHTGEKPFQCRICMRNFSRREHLVRHLRTHLRGS |
| 99 | mRNA0062 | SRPGERPFQCRICMRNFSQGETLKRHLRTHTGEKPFQCRICMRNFSRADNLRRHLKTHTG |
| | | SQKPFQCRICMRNFSDKANLTRHLRTHTGEKPFQCRICMRNFSDQGNLIRHLKTHTGGGG |
| | | SQKPFQCRICMRNFSHRHVLINHTRTHTGEKPFQCRICMRNFSTNSSLTRHLRTHLRGS |
| 100 | mRNA0063 | SRPGERPFQCRICMRNFSQGETLKRHLRTHTGEKPFQCRICMRNFSRADNLRRHLKTHTG |
| | | SQKPFQCRICMRNFSDSSNLRRHLRTHTGEKPFQCRICMRNFSDQGNLIRHLKTHTGGGG |
| | | SQKPFQCRICMRNFSHKSSLTRHLRTHTGEKPFQCRICMRNFSIRTSLKRHLKTHLRGS |
| 101 | mRNA0069 | SRPGERPFQCRICMRNFSQGETLKRHLRTHTGEKPFQCRICMRNFSRADNLRRHLKTHTG |
| | | SQKPFQCRICMRNFSEQGNLLRHLRTHTGEKPFQCRICMRNFSDGGNLGRHLKTHTGGGG |
| | | SQKPFQCRICMRNFSHRHVLINHTRTHTGEKPFQCRICMRNFSTNSSLTRHLRTHLRGS |
| 102 | HBV target | GATGAGGCATAGCAGCAG |
| | sequence | |
| 103 | HBV target | GATGATTAGGCAGAGGTG |
| | sequence | |
| 104 | HBV target | GGATTCAGCGCCGACGGG |
| | sequence | |
| 105 | HBV target | GGCAGTAGTCGGAACAGGG |
| | sequence | |
| 106 | HBV target | GTAAACTGAGCCAGGAGAA |
| | sequence | |
| 107 | HBV target | ACGGTGGTCTCCATGCGAC |
| | sequence | |
| 108 | HBV target | GCTGGATGTGTCTGCGGCG |
| | sequence | |
| 109 | HBV target | GTCTGCGAGGCGAGGGAG |
| | sequence | |
| 110 | HBV target | GTTGCCGGGCAACGGGGTA |
| | sequence | |
| 111 | HBV target | CGAGAAAGTGAAAGCCTGC |
| | sequence | |
| 112 | HBV target | GAGGCTTGAACAGTAGGAC |
| | sequence | |
| 113 | HBV target | GAGGTTGGGGACTGCGAA |
| | sequence | |
| 114 | HBV target | GATGATGTGGTATTGGGG |
| | sequence | |
| 115 | HBV target | GATGATGTGGTATTGGGGG |
| | sequence | |
| 116 | HBV target | GCAGTAGTCGGAACAGGG |
| | sequence | |
| 117 | HBV target | GCATAGCAGCAGGATGAA |
| | sequence | |
| 118 | HBV target | GGCGTTCACGGTGGTCTCC |
| | sequence | |
| 119 | HBV target | GTTGGTGAGTGATTGGAG |
| | sequence | |
| 120 | HBV target | GGAGGTTGGGGACTGCGAA |
| | sequence | |
| 121 | HBV target | GGATGATGTGGTATTGGGG |
| | sequence | |
| 122 | HBV target | GGATGTGTCTGCGGCGTT |
| | sequence | |
| 123 | HBV target | GGGGGTTGCGTCAGCAAAC |
| | sequence | |
| 124 | HBV target | GTTGTTAGACGACGAGGCA |
| | sequence | |
| 125 | F1 | KKFNLLQ |
| 126 | F1 | RRHILDR |
| 127 | F1 | RREVLEN |
| 128 | F1 | RRAVLDR |
| 129 | F1 | RQEHLVR |
| 130 | F1 | RREHLVR |
| 131 | F1 | KKDHLHR |
| 132 | F1 | KTDHLAR |
| 133 | F1 | QAGNLVR |
| 134 | F1 | QRGNLQR |
| 135 | F1 | DRGNLTR |
| 136 | F1 | RTDTLAR |
| 137 | F1 | RADNLGR |
| 138 | F1 | QQSSLLR |
| 139 | F1 | QASALSR |
| 140 | F1 | RGRNLEM |
| 141 | F1 | RRRNLDV |
| 142 | F1 | RGRNLAI |
| 143 | F1 | DGSNLRR |
| 144 | F1 | DPSNLQR |
| 145 | F1 | QQTNLTR |
| 146 | F1 | RATHLTR |
| 147 | F1 | RVDHLHR |
| 148 | F1 | RKHHLGR |
| 149 | F1 | DKSSLRK |
| 150 | F1 | CNGSLKK |
| 151 | F1 | TNNNLAR |
| 152 | F1 | RNTHLAR |
| 153 | F1 | HKSSLTR |
| 154 | F1 | GHTALRN |
| 155 | F1 | QGETLKR |
| 156 | F2 | RQDNLNS |
| 157 | F2 | RKDYLIS |
| 158 | F2 | RQDNLGR |
| 159 | F2 | RRDNLNR |
| 160 | F2 | EGGNLMR |
| 161 | F2 | DPSNLQR |
| 162 | F2 | DMGNLGR |
| 163 | F2 | QKEILTR |
| 164 | F2 | QNSHLRR |
| 165 | F2 | QTTHLSR |
| 166 | F2 | QARSLRA |
| 167 | F2 | RTDSLPR |
| 168 | F2 | RLDMLAR |
| 169 | F2 | RNTHLSY |
| 170 | F2 | RREHLVR |
| 171 | F2 | DSSVLRR |
| 172 | F2 | RIDNLDG |
| 173 | F2 | RRDNLPK |
| 174 | F2 | ANRTLVH |
| 175 | F2 | RADVLKG |
| 176 | F2 | RKESLTV |
| 177 | F2 | RREHLSG |
| 178 | F2 | RREHLTI |
| 179 | F2 | RSDHLSL |
| 180 | F2 | VGGNLAR |
| 181 | F2 | VGGNLSR |
| 182 | F2 | DHSSLKR |
| 183 | F2 | RTDSLTL |
| 184 | F2 | ESGHLKR |
| 185 | F2 | EGGHLKR |
| 186 | F2 | QSGTLHR |
| 187 | F2 | QSTTLKR |
| 188 | F2 | RADNLRR |
| 189 | F3 | RSHNLKL |
| 190 | F3 | RSHNLRL |
| 191 | F3 | QSTTLKR |
| 192 | F3 | SDRRDLD |
| 193 | F3 | QSAHLKR |
| 194 | F3 | DLSTLRR |
| 195 | F3 | DGSTLRR |
| 196 | F3 | EKASLIK |
| 197 | F3 | DKSSLRK |
| 198 | F3 | CNGSLKK |
| 199 | F3 | DHSSLKR |
| 200 | F3 | RGDGLRR |
| 201 | F3 | RKLGLLR |
| 202 | F3 | GLTALRT |
| 203 | F3 | QNANLKR |
| 204 | F3 | LKSNLHR |
| 205 | F3 | QRRYLVE |
| 206 | F3 | TTFNLRV |
| 207 | F3 | EEANLRR |
| 208 | F3 | QRSSLVR |
| 209 | F3 | QSSSLVR |
| 210 | F3 | KRYNLYQ |
| 211 | F3 | KKFNLLQ |
| 212 | F3 | RNFILQR |
| 213 | F3 | RNFILAR |
| 214 | F3 | QREHLTT |
| 215 | F3 | QREHLNG |
| 216 | F3 | DPANLRR |
| 217 | F3 | RRRNLTL |
| 218 | F3 | RRRNLQL |
| 219 | F3 | DKANLTR |
| 220 | F3 | DSSNLRR |
| 221 | F3 | EQGNLLR |
| 222 | F4 | QSTTLKR |
| 223 | F4 | RRDGLAG |
| 224 | F4 | SFQSYLE |
| 225 | 74 | ETGSLRR |
| 226 | F4 | DRTPLNR |
| 227 | F4 | QNEHLKV |
| 228 | F4 | QKTHLAV |
| 229 | F4 | DHSSLKR |
| 230 | F4 | QPHGLAH |
| 231 | F4 | QPHGLRH |
| 232 | F4 | QPHGLST |
| 233 | F4 | RRDNLNR |
| 234 | F4 | RQDNLGR |
| 235 | F4 | ERAKLIR |
| 236 | F4 | QKHHLAV |
| 237 | F4 | LKQHLVV |
| 238 | F4 | QQTNLAR |
| 239 | F4 | QTQNLTR |
| 240 | F4 | RGEHLTR |
| 241 | F4 | RREHLVR |
| 242 | F4 | RKDALHV |
| 243 | F4 | RKERLAT |
| 244 | F4 | DPTSLNR |
| 245 | F4 | RQDNLNT |
| 246 | F4 | RRDNLKS |
| 247 | F4 | RNDTLII |
| 248 | F4 | RQDILVV |
| 249 | F4 | RGDNLKR |
| 250 | F4 | RGDNLAR |
| 251 | F4 | RQEHLVR |
| 252 | F4 | DRSSLKR |
| 253 | F4 | AMRSLMG |
| 254 | F4 | QQRSLVG |
| 255 | F4 | DQGNLIR |
| 256 | F4 | DGGNLGR |
| 257 | F5 | RNTNLTR |
| 258 | F5 | RQDNLGR |
| 259 | F5 | VHHNLVR |
| 260 | ?5 | RPNHLAI |
| 261 | F5 | QSHSLKS |
| 262 | F5 | QKHHLVT |
| 263 | F5 | GGTALRM |
| 264 | F5 | GGSALSM |
| 265 | F5 | RRFILSR |
| 266 | F5 | RNFILQR |
| 267 | F5 | QSAHLKR |
| 268 | F5 | QQAHLVR |
| 269 | F5 | RARNLTL |
| 270 | F5 | RRRNLQL |
| 271 | F5 | AKRDLDR |
| 272 | F5 | LRKDLVR |
| 273 | F5 | QRSNLAR |
| 274 | F5 | LKTNLAR |
| 275 | F5 | QRSDLTR |
| 276 | F5 | HKETLNR |
| 277 | F5 | TNSSLTR |
| 278 | F5 | MTSSLRR |
| 279 | F5 | VRHNLTR |
| 280 | F5 | VAHNLTR |
| 281 | F5 | QSSSLVR |
| 282 | F5 | RSHNLKL |
| 283 | F5 | RSHNLRL |
| 284 | F5 | TSTLLKR |
| 285 | F5 | HKSSLTR |
| 286 | F5 | RRQKLTI |
| 287 | F5 | MKHHLGR |
| 288 | F5 | LKQHLVR |
| 289 | F5 | QNEHLKV |
| 290 | F5 | QKTHLAV |
| 291 | F5 | QPHSLAV |
| 292 | F5 | RRQHLQY |
| 293 | F5 | RRSRLVR |
| 294 | F5 | EAHHLSR |
| 295 | F5 | RQSRLQR |
| 296 | F5 | HRHVLIN |
| 297 | F6 | IKHNLAR |
| 298 | F6 | VVNNLNR |
| 299 | F6 | ISHNLAR |
| 300 | F6 | QSPHLKR |
| 301 | F6 | ESGHLKR |
| 302 | F6 | ENSKLRR |
| 303 | F6 | QRSSLVR |
| 304 | F6 | RNDSLKC |
| 305 | F6 | RNDTLII |
| 306 | F6 | VGNSLSR |
| 307 | F6 | VHESLKR |
| 308 | F6 | DPSSLKR |
| 309 | F6 | DHSSLKR |
| 310 | F6 | VNSSLTR |
| 311 | F6 | VRHSLTR |
| 312 | F6 | QKVHLEA |
| 313 | F6 | QKCHLKA |
| 314 | F6 | RGDNLNR |
| 315 | F6 | REDNLGR |
| 316 | F6 | RIDNLIR |
| 317 | F6 | RQDNLGR |
| 318 | F6 | QTNTLGR |
| 319 | F6 | QGGTLRR |
| 320 | F6 | QSTTLKR |
| 321 | F6 | LKEHLTR |
| 322 | F6 | HKSSLTR |
| 323 | F6 | QNSHLRR |
| 324 | F6 | QGGHLAR |
| 325 | F6 | QGGHLKR |
| 326 | F6 | QKPHLSR |
| 327 | F6 | QSAHLKR |
| 328 | F6 | RGEHLTR |
| 329 | F6 | RTEHLAR |
| 330 | F6 | RREHLVR |
| 331 | F6 | TNSSLTR |
| 332 | F6 | IRTSLKR |
| 495 | ZIM3 | MNNSQGRVTFEDVTVNFTQGEWQRLNPEQRNLYRDVMLENYSNLVSVGQGETTKPDVILR |
| | | LEQGKEPWLEEEEVLGSGRAEKNGDIGGQIWKPKDVKESL |
| 496 | ZNF436 | MAATLLMAGSQAPVTFEDMAMYLTREEWRPLDAAQRDLYRDVMQENYGNVVSLDFEIRSE |
| | | NEVNPKQEISEDVQFGTTSERPAENAEENPESEEGFESGDRSERQW |
| 497 | ZNF257 | MLENYRNLVFLGIAVSKPDLITCLEQGKEPCNMKRHEMVAKPPVMCSHIAEDLCPERDIK |
| | | YFFQKVILRRYDKCEHENLQLRKGCKSVDECKVCK |
| 498 | ZNF675 | MGLLTFRDVAIEFSLEEWQCLDTAQRNLYKNVILENYRNLVFLGIAVSKQDLITCLEQEK |
| | | EPLTVKRHEMVNEPPVMCSHFAQEFWPEQNIKDSF |
| 499 | ZNF490 | MLQMQNSEHHGQSIKTQTDSISLEDVAVNFTLEEWALLDPGQRNIYRDVMRATFKNLACI |
| | | GEKWKDQDIEDEHKNQGRNLRSPMVEALCENKEDCPCGKSTSQIPDLNTNLETPTG |
| 500 | ZNF320 | MALSQGLLTFRDVAIEFSQEEWKCLDPAQRTLYRDVMLENYRNLVSLDISSKCMMNTLSS |
| | | TGQGNTEVIHTGTLQRQASYHIGAFCSQEIEKDIHDFVFQ |
| 501 | ZNF331 | MAQGLVTFADVAIDFSQEEWACLNSAQRDLYWDVMLENYSNLVSLDLESAYENKSLPTKK |
| | | NIHEIRASKRNSDRRSKSLGRNWICEGTLERPQRSRGR |
| 502 | ZNF816 | MLREEATKKSKEKEPGMALPQGRLTFRDVAIEFSLEEWKCLNPAQRALYRAVMLENYRNL |
| | | EFVDSSLKSMMEFSSTRHSITGEVIHTGTLQRHKSHHIGDFCFPEMKKDIHHFEFQWQ |
| 503 | ZNF680 | MPGPPGSLEMGPLTFRDVAIEFSLEEWQCLDTAQRNLYRKVMFENYRNLVFLGIAVSKPH |
| | | LITCLEQGKEPWNRKRQEMVAKPPVIYSHFTEDLWPEHSIKDSF |
| 504 | ZNF41 | MSPPWSPALAAEGRGSSCEASVSFEDVTVDESKEEWQHLDPAQRRLYWDVTLENYSHLLS |
| | | VGYQIPKSEAAFKLEQGEGPWMLEGEAPHQSCSGEAIGKMQQQGIPGGIFFHC |
| 505 | ZNF189 | MASPSPPPESKEEWDYLDPAQRSLYKDVMMENYGNLVSLDVLNRDKDEEPTVKQEIEEIE |
| | | EEVEPQGVIVTRIKSEIDQDPMGRETFELVGRLDKQRGIFLWEIPRESL |
| 506 | ZNF528 | MALTQGPLKFMDVAIEFSQEEWKCLDPAQRTLYRDVMLENYRNLVSLGICLPDLSVTSML |
| | | EQKRDPWTLQSEEKIANDPDGRECIKGVNTERSSKLGSN |
| 507 | ZNF543 | MAASAQVSVTFEDVAVTFTQEEWGQLDAAQRTLYQEVMLETCGLLMSLGCPLFKPELIYQ |
| | | LDHRQELWMATKDLSQSSYPGDNTKPKTTEPTFSHLALPE |
| 508 | ZNF554 | MFSQEERMAAGYLPRWSQELVTFEDVSMDFSQEEWELLEPAQKNLYREVMLENYRNVVSL |
| | | EALKNQCTDVGIKEGPLSPAQTSQVTSLSSWTGYLLFQPVASSHLEQREALWIEEKGTPQ |
| | | ASCSDWMTVLRNQDSTYKKVALQE |
| 509 | ZNF140 | MSQGSVTFRDVAIDFSQEEWKWLQPAQRDLYRCVMLENYGHLVSLGLSISKPDVVSLLEQ |
| | | GKEPWLGKREVKRDLFSVSESSGEIKDFSPKNVIYDD |
| 510 | ZNF610 | MEEAQKRKAKESGMALPQGRLTFMDVAIEFSQEEWKSLDPGQRALYRDVMLENYRNLVFL |
| | | GRSCVLGSNAENKPIKNQLGLTLESHLSELQLFQAGRKIYRSNQVEKFTNHR |
| 511 | ZNF264 | MAAAVLTDRAQVSVTFDDVAVTFTKEEWGQLDLAQRTLYQEVMLENCGLLVSLGCPVPKA |
| | | ELICHLEHGQEPWTRKEDLSQDTCPGDKGKPKTTEPTTCEPALSE |
| 512 | ZNF350 | MIQAQESITLEDVAVDFTWEEWQLLGAAQKDLYRDVMLENYSNLVAVGYQASKPDALFKL |
| | | EQGEQLWTIEDGIHSGACSDIWKVDHVLERLQSESLVNR |
| 513 | ZNF8 | MEGVAGVMSVGPPAARLQEPVTFRDVAVDFTQEEWGQLDPTQRILYRDVMLETFGHLLSI |
| | | GPELPKPEVISQLEQGTELWVAERGTTQGCHPAWEPRSESQASRKEEGLPEE |
| 514 | ZNF582 | MSLGSELFRDVAIVFSQEEWQWLAPAQRDLYRDVMLETYSNLVSLGLAVSKPDVISFLEQ |
| | | GKEPWMVERVVSGGLCPVLESRYDTKELFPKQHVYEV |
| 515 | ZNF30 | MAHKYVGLQYHGSVTFEDVAIAFSQQEWESLDSSQRGLYRDVMLENYRNLVSMAGHSRSK |
| | | PHVIALLEQWKEPEVTVRKDGRRWCTDLQLFDDTIGCKEMPTSEN |
| 516 | ZNF324 | MAFEDVAVYFSQEEWGLLDTAQRALYRRVMLDNFALVASLGLSTSRPRVVIQLERGEEPW |
| | | VPSGTDTTLSRTTYRRRNPGSWSLTEDRDVSG |
| 517 | ZNF98 | MLENYRNLVFVGIAASKPDLITCLEQGKEPWNVKRHEMVTEPPVVYSYFAQDLWPKQGKK |
| | | NYFQKVILRTYKKCGRENLQLRKYCKSMDECKVHKECYNGLNQC |
| 518 | ZNF669 | MHFRRPDPCREPLASPIQDSVAFEDVAVNFTQEEWALLDSSQKNLYREVMQETCRNLASV |
| | | GSQWKDQNIEDHFEKPGKDIRNHIVQRLCESKEDGQYGEVVSQIPNLDLNENISTGLKPC |
| | | ECSICGK |
| 519 | ZNF677 | MALSQGLFTFKDVAIEFSQEEWECLDPAQRALYRDVMLENYRNLLSLDEDNIPPEDDISV |
| | | GFTSKGLSPKENNKEELYHLVILERKESHGINNFDLKEVWENMPKFDSLW |
| 520 | ZNF596 | MTFEDIIVDFTQEEWALLDTSQRKLFQDVMLENISHLVSIGKQLCKSVVLSQLEQVEKLS |
| | | TQRISLLQGREVGIKHQEIPFIHHIYQKGTSTISTMRS |
| 521 | ZNF214 | MAVTFEDVTIIFTWEEWKFLDSSQKRLYREVMWENYTNVMSVENWNESYKSQEEKFRYLE |
| | | YENFSYWQGWWNAGAQMYENQNYGETVQGTDSKDLTQQDRSQC |
| 522 | ZNF37A | MITSQGSVSFRDVTVGFTQEEWQHLDPAQRTLYRDVMLENYSHLVSVGYCIPKPEVILKL |
| | | EKGEEPWILEEKFPSQSHLELINTSRNYSIMKFNEFNKG |
| 523 | ZNF34 | MFEDVAVYLSREEWGRLGPAQRGLYRDVMLETYGNLVSLGVGPAGPKPGVISQLERGDEP |
| | | WVLDVQGTSGKEHLRVNSPALGTRTEYKELTSQETFGEEDPQGSEPVEACDHIS |
| 524 | ZNF250 | METYGNVVSLGLPGSKPDIISQLERGEDPWVLDRKGAKKSQGLWSDYSDNLKYDHTTACT |
| | | QQDSLSCPWECETKGESQNTDLSPKPLISEQTVILGKTPLGRIDQENNETKQ |
| 525 | ZNF547 | MAEMNPAQGHVVFEDVAIYFSQEEWGHLDEAQRLLYRDVMLENLALLSSLGCCHGAEDEE |
| | | APLEPGVSVGVSQVMAPKPCLSTQNTQPCETCSSLLKDILRL |
| 526 | ZNF273 | MLDNYRNLVFLGIAVSKPDLITCLEQGKEPCNMKRHAMVAKPPVVCSHFAQDLWPKQGLK |
| | | DS |
| 527 | ZNF354A | MAAGQREARPQVSLTFEDVAVLFTRDEWRKLAPSQRNLYRDVMLENYRNLVSLGLPFTKP |
| | | KVISLLQQGEDPWEVEKDGSGVSSLGSKSSHKTTKSTQTQDSSFQ |
| 528 | ZFP82 | MALRSVMFSDVSIDFSPEEWEYLDLEQKDLYRDVMLENYSNLVSLGCFISKPDVISSLEQ |
| | | GKEPWKVVRKGRRQYPDLETKYETKKLSLENDIYEIN |
| 529 | ZNF224 | MTTFKEAMTFKDVAVVFTEEELGLLDLAQRKLYRDVMLENFRNLLSVGHQAFHRDTFHFL |
| | | REEKIWMMKTAIQREGNSGDKIQTEMETVSEAGTHQEW |
| 530 | ZNF33A | MFQVEQKSQESVSFKDVTVGFTQEEWQHLDPSQRALYRDVMLENYSNLVSVGYCVHKPEV |
| | | IFRLQQGEEPWKQEEEFPSQSFPEVWTADHLKERSQENQSKHL |
| 531 | ZNF45 | MTKSKEAVTFKDVAVVFSEEELQLLDLAQRKLYRDVMLENFRNVVSVGHQSTPDGLPQLE |
| | | REEKLWMMKMATQRDNSSGAKNLKEMETLQEVGLRYLP |
| 532 | ZNF175 | MSQKPQVLGPEKQDGSCEASVSFEDVTVDFSREEWQQLDPAQRCLYRDVMLELYSHLFAV |
| | | GYHIPNPEVIFRMLKEKEPRVEEAEVSHQRCQEREFGLEIPQKEISKKASFQ |
| 533 | ZNF595 | MELVTFRDVAIEFSPEEWKCLDPAQQNLYRDVMLENYRNLVSLGFVISNPDLVTCLEQIK |
| | | EPCNLKIHETAAKPPAICSPFSQDLSPVQGIEDSF |
| 534 | ZNF184 | MSTLLQGGHNLLSSASFQESVTFKDVIVDFTQEEWKQLDPGQRDLFRDVTLENYTHLVSI |
| | | GLQVSKPDVISQLEQGTEPWIMEPSIPVGTCADWETRLENSVSAPEPDISEE |
| 535 | ZNF419 | MDPAQVPVAADLLTDHEEGYVTFEDVAVYFSQEEWRLLDDAQRLLYRNVMLENFTLLASL |
| | | GLASSKTHEITQLESWEEPFMPAWEVVTSAIPRGCWHGAEAEEAPEQIASVG |
| 536 | ZFP28-1 | MKKLEAVGTGIEPKAMSQGLVTFGDVAVDFSQEEWEWLNPIQRNLYRKVMLENYRNLASL |
| | | GLCVSKPDVISSLEQGKEPWTVKRKMTRAWCPDLKAVWKIKELPLKKDFCEG |
| 537 | ZFP28-2 | MSLLGEHWDYDALFETQPGLVTIKNLAVDFRQQLHPAQKNFCKNGIWENNSDLGSAGHCV |
| | | AKPDLVSLLEQEKEPWMVKRELTGSLFSGQRSVHETQELFPKQDSYAE |
| 538 | ZNF18 | MLALAASQPARLEERLIRDRDLGASLLPAAPQEQWRQLDSTQKEQYWDLILETYGKMVSG |
| | | AGISHPKSDLTNSIEFGEELAGIYLHVNEKIPRPTCIGDRQENDKENLNLENH |
| 539 | ZNF213 | MEGRPGETTDTCFVSGVHGPVALGDIPFYFSREEWGTLDPAQRDLFWDIKRENSRNTTLG |
| | | FGLKGQSEKSLLQEMVPVVPGQTGSDVTVSWSPEEAEAWESFNRPRAALGPVVGARRGRP |
| | | PTRRRQFRDLA |
| 540 | ZNF394 | MVAVVRALQRALDGTSSQGMVTFEDTAVSLTWEEWERLDPARRDFCRESAQKDSGSTVPP |
| | | SLESRVENKELIPMQQILEEAEPQGQLQEAFQGKRPLFSKCGSTHEDRVEKQSGDP |
| 541 | ZFP1 | MNKSQGSVSFTDVTVDFTQEEWEQLDPSQRILYMDVMLENYSNLLSVEVWKADDQMERDH |
| | | RNPDEQARQFLILKNQTPIEERGDLFGKALNLNTDFVSLRQVPYKYDLYEKTL |
| 542 | ZFP14 | MAHGSVTFRDVAIDFSQEEWEFLDPAQRDLYRDVMWENYSNFISLGPSISKPDVITLLDE |
| | | ERKEPGMVVREGTRRYCPDLESRYRTNTLSPEKDIYEIYSFQWDIMER |
| 543 | ZNF416 | MAAAVLRDSTSVPVTAEAKLMGFTQGCVTFEDVAIYFSQEEWGLLDEAQRLLYRDVMLEN |
| | | FALITALVCWHGMEDEETPEQSVSVEGVPQVRTPEASPSTQKIQSCDMCVPFLTDILHLT |
| | | DLPGQELYLTGACAVFHQDQK |
| 544 | ZNF557 | MLPPTAASQREGHTEGGELVNELLKSWLKGLVTFEDVAVEFTQEEWALLDPAQRTLYRDV |
| | | MLENCRNLASLGNQVDKPRLISQLEQEDKVMTEERGILSGTCPDVENPFKAKGLTPKLHV |
| | | FRKEQSRNMKMER |
| 545 | ZNF566 | MAQESVMFSDVSVDFSQEEWECLNDDQRDLYRDVMLENYSNLVSMGHSISKPNVISYLEQ |
| | | GKEPWLADRELTRGQWPVLESRCETKKLFLKKEIYEIESTQWEIMEK |
| 546 | ZNF729 | MPGAPGSLEMGPLTFRDVTIEFSLEEWQCLDTVQQNLYRDVMLENYRNLVFLGMAVFKPD |
| | | LITCLKQGKEPWNMKRHEMVTKPPVMRSHFTQDLWPDQSTKDSFQEVILRTYAR |
| 547 | ZIM2 | MAGSQFPDFKHLGTFLVFEELVTFEDVLVDFSPEELSSLSAAQRNLYREVMLENYRNLVS |
| | | LGHQFSKPDIISRLEEEESYAMETDSRHTVICQGE |
| 548 | ZNF254 | MPGPPRSLEMGLLTFRDVAIEFSLEEWQHLDIAQQNLYRNVMLENYRNLAFLGIAVSKPD |
| | | LITCLEQGKEPWNMKRHE |
| 549 | ZNF764 | MAPPLAPLPPRDPNGAGPEWREPGAVSFADVAVYFCREEWGCLRPAQRALYRDVMRETYG |
| | | HLSALGIGGNKPALISWVEEEAELWGPAAQDPE |
| 550 | ZNF785 | MGPPLAPRPAHVPGEAGPRRTRESRPGAVSFADVAVYFSPEEWECLRPAQRALYRDVMRE |
| | | TFGHLGALGFSVPKPAFISWVEGEVEAWSPEAQDPDGESS |
| 551 | ZNF10 (KOX1) | MDAKSLTAWSRTLVTFKDVFVDFTREEWKLLDTAQQIVYRNVMLENYKNLVSLGYQLTKP |
| | | DVILRLEKGEEPWLVEREIHQETHPDSETAFEIKSSVSSRSIFKDKQSCDIKMEGMARND |
| | | LWYLSLEEVWKCRDQLDKYQENPERHLRQVAFTQKKVLTQERVSESGKYGGNCLLPAQLV |
| | | LREYFHKRDSHTKSLKHDLVLNGHQDSCASNSNECGQTFCQNIHLIQFARTHTGDKSYKC |
| | | PDNDNSLTHGSSLGISKGIHREKPYECKECGKFFSWRSNLTRHQLIHTGEKPYECKECGK |
| | | SFSRSSHLIGHQKTHTGEEPYECKECGKSFSWFSHLVTHQRTHTGDKLYTCNQCGKSFVH |
| | | SSRLIRHQRTHTGEKPYECPECGKSFRQSTHLILHQRTHVRVRPYECNECGKSYSQRSHL |
| | | VVHHRIHTGLKPFECKDCGKCFSRSSHLYSHQRTHTGEKPYECHDCGKSFSQSSALIVHQ |
| | | RIHTGEKPYECCQCGKAFIRKNDLIKHQRIHVGEETYKCNQCGIIFSQNSPFIVHQIAHT |
| | | GEQFLTCNQCGTALVNTSNLIGYQTNHIRENAY |
| 552 | CBX 5 | MGKKTKRTADSSSSEDEEEYVVEKVLDRRVVKGQVEYLLKWKGFSEEHNTWEPEKNLDCP |
| | (chromoshadow | ELISEFMKKYKKMKEGENNKPREKSESNKRKSNFSNSADDIKSKKKREQSNDIARGFERG |
| | domain) | LEPEKIIGATDSCGDLMFLMKWKDTDEADLVLAKEANVKCPQIVIAFYEERLTWHAYPED |
| | | AENKEKETAKS |
| 553 | RYBP(YAF2_RYBP | MTMGDKKSPTRPKRQAKPAADEGFWDCSVCTFRNSAEAFKCSICDVRKGTSTRKPRINSQ |
| | component of | LVAQQVAQQYATPPPPKKEKKEKVEKQDKEKPEKDKEISPSVTKKNTNKKTKPKSDILKD |
| | PRC1) | PPSEANSIQSANATTKTSETNHTSRPRLKNVDRSTAQQLAVTVGNVTVIITDFKEKTRSS |
| | | STSSSTVTSSAGSEQQNQSSSGSESTDKGSSRSSTPKGDMSAVNDESF |
| 554 | YAF2 (YAF2_RYBP | MGDKKSPTRPKRQPKPSSDEGYWDCSVCTFRNSAEAFKCMMCDVRKGTSTRKPRPVSQLV |
| | component of | AQQVTQQFVPPTQSKKEKKDKVEKEKSEKETTSKKNSHKKTRPRLKNVDRSSAQHLEVTV |
| | PRC1) | GDLTVIITDFKEKTKSPPASSAASADQHSQSGSSSDNTERGMSRSSSPRGEASSLNGESH |
| 555 | MGA (component | MEEKQQIILANQDGGTVAGAAPTFFVILKQPGNGKTDQGILVTNQDACALASSVSSPVKS |
| | of PRC1.6) | KGKICLPADCTVGGITVTLDNNSMWNEFYHRSTEMILTKQGRRMFPYCRYWITGLDSNLK |
| | | YILVMDISPVDNHRYKWNGRWWEPSGKAEPHVLGRVFIHPESPSTGHYWMHQPVSFYKLK |
| | | LTNNTLDQEGHIILHSMHRYLPRLHLVPAEKAVEVIQLNGPGVHTFTFPQTEFFAVTAYQ |
| | | NIQITQLKIDYNPFAKGFRDDGLNNKPQRDGKQKNSSDQEGNNISSSSGHRVRLTEGQGS |
| | | EIQPGDLDPLSRGHETSGKGLEKTSLNIKRDFLGFMDTDSALSEVPQLKQEISECLIASS |
| | | FEDDSRVASPLDQNGSFNVVIKEEPLDDYDYELGECPEGVTVKQEETDEETDVYSNSDDD |
| | | PILEKQLKRHNKVDNPEADHLSSKWLPSSPSGVAKAKMFKLDTGKMPVVYLEPCAVTRST |
| | | VKISELPDNMLSTSRKDKSSMLAELEYLPTYIENSNETAFCLGKESENGLRKHSPDLRVV |
| | | QKYPLLKEPQWKYPDISDSISTERILDDSKDSVGDSLSGKEDLGRKRTTMLKIATAAKVV |
| | | NANQNASPNVPGKRGRPRKLKLCKAGRPPKNTGKSLISTKNTPVSPGSTFPDVKPDLEDV |
| | | DGVLFVSFESKEALDIHAVDGTTEESSSLQASTTNDSGYRARISQLEKELIEDLKTLRHK |
| | | QVIHPGLQEVGLKLNSVDPTMSIDLKYLGVQLPLAPATSFPFWNLTGTNPASPDAGFPFV |
| | | SRTGKTNDFTKIKGWRGKFHSASASRNEGGNSESSLKNRSAFCSDKLDEYLENEGKLMET |
| | | SMGFSSNAPTSPVVYQLPTKSTSYVRTLDSVLKKQSTISPSTSYSLKPHSVPPVSRKAKS |
| | | QNRQATFSGRTKSSYKSILPYPVSPKQKYSHVILGDKVTKNSSGIISENQANNFVVPTLD |
| | | ENIFPKQISLRQAQQQQQQQQGSRPPGLSKSQVKLMDLEDCALWEGKPRTYITEERADVS |
| | | LTTLLTAQASLKTKPIHTIIRKRAPPCNNDFCRLGCVCSSLALEKRQPAHCRRPDCMFGC |
| | | TCLKRKVVLVKGGSKTKHFQRKAAHRDPVFYDTLGEEAREEEEGIREEEEQLKEKKKRKK |
| | | LEYTICETEPEQPVRHYPLWVKVEGEVDPEPVYIPTPSVIEPMKPLLLPQPEVLSPTVKG |
| | | KLLTGIKSPRSYTPKPNPVIREEDKDPVYLYFESMMTCARVRVYERKKEDQRQPSSSSSP |
| | | SPSFQQQTSCHSSPENHNNAKEPDSEQQPLKQLTCDLFDDSDKLQEKSWKSSCNEGESSS |
| | | TSYMHQRSPGGPTKLIEIISDCNWEEDRNKILSILSQHINSNMPQSLKVGSFIIELASQR |
| | | KSRGEKNPPVYSSRVKISMPSCQDQDDMAEKSGSETPDGPLSPGKMEDISPVQTDALDSV |
| | | RERLHGGKGLPFYAGLSPAGKLVAYKRKPSSSTSGLIQVASNAKVAASRKPRTLLPSTSN |
| | | SKMASSSGTATNRPGKNLKAFVPAKRPIAARPSPGGVFTQFVMSKVGALQQKIPGVSTPQ |
| | | TLAGTQKFSIRPSPVMVVTPVVSSEPVQVCSPVTAAVTTTTPQVFLENTTAVTPMTAISD |
| | | VETKETTYSSGATTTGVVEVSETNTSTSVTSTQSTATVNLTKTTGITTPVASVAFPKSLV |
| | | ASPSTITLPVASTASTSLVVVTAAASSSMVTTPTSSLGSVPIILSGINGSPPVSQRPENA |
| | | AQIPVATPQVSPNTVKRAGPRLLLIPVQQGSPTLRPVSNTQLQGHRMVLQPVRSPSGMNL |
| | | FRHPNGQIVQLLPLHQLRGSNTQPNLQPVMFRNPGSVMGIRLPAPSKPSETPPSSTSSSA |
| | | FSVMNPVIQAVGSSSAVNVITQAPSLLSSGASFVSQAGTLTLRISPPEPQSFASKTGSET |
| | | KITYSSGGQPVGTASLIPLQSGSFALLQLPGQKPVPSSILQHVASLQMKRESQNPDQKDE |
| | | TNSIKREQETKKVLQSEGEAVDPEANVIKQNSGAATSEETLNDSLEDRGDHLDEECLPEE |
| | | GCATVKPSEHSCITGSHTDQDYKDVNEEYGARNRKSSKEKVAVLEVRTISEKASNKTVQN |
| | | LSKVQHQKLGDVKVEQQKGFDNPEENSSEFPVTFKEESKFELSGSKVMEQQSNLQPEAKE |
| | | KECGDSLEKDRERWRKHLKGPLTRKCVGASQECKKEADEQLIKETKTCQENSDVFQQEQG |
| | | ISDLLGKSGITEDARVLKTECDSWSRISNPSAFSIVPRRAAKSSRGNGHFQGHLLLPGEQ |
| | | IQPKQEKKGGRSSADFTVLDLEEDDEDDNEKTDDSIDEIVDVVSDYQSEEVDDVEKNNCV |
| | | EYIEDDEEHVDIETVEELSEEINVAHLKTTAAHTQSFKQPSCTHISADEKAAERSRKAPP |
| | | IPLKLKPDYWSDKLQKEAEAFAYYRRTHTANERRRRGEMRDLFEKLKITLGLLHSSKVSK |
| | | SLILTRAFSEIQGLTDQADKLIGQKNLLTRKRNILIRKVSSLSGKTEEVVLKKLEYIYAK |
| | | QQALEAQKRKKKMGSDEFDISPRISKQQEGSSASSVDLGQMFINNRRGKPLILSRKKDQA |
| | | TENTSPLNTPHTSANLVMTPQGQLLTLKGPLFSGPVVAVSPDLLESDLKPQVAGSAVALP |
| | | ENDDLFMMPRIVNVTSLATEGGLVDMGGSKYPHEVPDSKPSDHLKDTVRNEDNSLEDKGR |
| | | ISSRGNRDGRVTLGPTQVFLANKDSGYPQIVDVSNMQKAQEFLPKKISGDMRGIQYKWKE |
| | | SESRGERVKSKDSSFHKLKMKDLKDSSIEMELRKVTSAIEEAALDSSELLTNMEDEDDTD |
| | | ETLTSLLNEIAFLNQQLNDDSVGLAELPSSMDTEFPGDARRAFISKVPPGSRATFQVEHL |
| | | GTGLKELPDVQGESDSISPLLLHLFDDDFSENEKQLAEPASEPDVLKIVIDSEIKDSLLS |
| | | NKKAIDGGKNTSGLPAEPESVSSPPTLHMKTGLENSNSTDTLWRPMPKLAPLGLKVANPS |
| | | SDADGQSLKVMPCLAPIAAKVGSVGHKMNLTGNDQEGRESKVMPTLAPVVAKLGNSGASP |
| | | SSAGK |
| 556 | CBX1 | MGKKQNKKKVEEVLEEEEEEYVVEKVLDRRVVKGKVEYLLKWKGFSDEDNTWEPEENLDC |
| | (chromoshadow) | PDLIAEFLQSQKTAHETDKSEGGKRKADSDSEDKGEESKPKKKKEESEKPRGFARGLEPE |
| | | RIIGATDSSGELMFLMKWKNSDEADLVPAKEANVKCPQVVISFYEERLTWHSYPSEDDDK |
| | | KDDKN |
| 557 | SCMH1 | MLVCYSVLACEILWDLPCSIMGSPLGHFTWDKYLKETCSVPAPVHCFKQSYTPPSNEFKI |
| | (SAM 1/SPM) | SMKLEAQDPRNTTSTCIATVVGLTGARLRLRLDGSDNKNDFWRLVDSAEIQPIGNCEKNG |
| | | GMLQPPLGFRLNASSWPMFLLKTLNGAEMAPIRIFHKEPPSPSHNFFKMGMKLEAVDRKN |
| | | PHFICPATIGEVRGSEVLVTFDGWRGAFDYWCRFDSRDIFPVGWCSLTGDNLQPPGTKVV |
| | | IPKNPYPASDVNTEKPSIHSSTKTVLEHQPGQRGRKPGKKRGRTPKTLISHPISAPSKTA |
| | | EPLKFPKKRGPKPGSKRKPRTLLNPPPASPTTSTPEPDTSTVPQDAATIPSSAMQAPTVC |
| | | IYLNKNGSTGPHLDKKKVQQLPDHFGPARASVVLQQAVQACIDCAYHQKTVFSFLKQGHG |
| | | GEVISAVFDREQHTLNLPAVNSITYVLRFLEKLCHNLRSDNLFGNQPFTQTHLSLTAIEY |
| | | SHSHDRYLPGETFVLGNSLARSLEPHSDSMDSASNPTNLVSTSQRHRPLLSSCGLPPSTA |
| | | SAVRRLCSRGVLKGSNERRDMESFWKLNRSPGSDRYLESRDASRLSGRDPSSWTVEDVMQ |
| | | FVREADPQLGPHADLFRKHEIDGKALLLLRSDMMMKYMGLKLGPALKLSYHIDRLKQGKF |
| 558 | MPP8 | MEQVAEGARVTAVPVSAADSTEELAEVEEGVGVVGEDNDAAARGAEAFGDSEEDGEDVFE |
| | (Chromodomain) | VEKILDMKTEGGKVLYKVRWKGYTSDDDTWEPEIHLEDCKEVLLEFRKKIAENKAKAVRK |
| | | DIQRLSLNNDIFEANSDSDQQSETKEDTSPKKKKKKLRQREEKSPDDLKKKKAKAGKLKD |
| | | KSKPDLESSLESLVFDLRTKKRISEAKEELKESKKPKKDEVKETKELKKVKKGEIRDLKT |
| | | KTREDPKFNRKTKKEKFVESQVESESSVINDSPFPEDDSEGLHSDSREEKQNTKSARERA |
| | | GQDMGLEHGFEKPLDSAMSAEEDTDVRGRRKKKTPRKAEDTRENRKLENKNAFLEKKTVP |
| | | KKQRNQDRSKSAAELEKLMPVSAQTPKGRRLSGEERGLWSTDSAEEDKETKRNESKEKYQ |
| | | KRHDSDKEEKGRKEPKGLKTLKEIRNAFDLFKLTPEEKNDVSENNRKREEIPLDFKTIDD |
| | | HKTKENKQSLKERRNTRDETDTWAYIAAEGDQEVLDSVCQADENSDGRQQILSLGMDLQL |
| | | EWMKLEDFQKHLDGKDENFAATDAIPSNVLRDAVKNGDYITVKVALNSNEEYNLDQEDSS |
| | | GMTLVMLAAAGGQDDLLRLLITKGAKVNGRQKNGTTALIHAAEKNFLTTVAILLEAGAFV |
| | | NVQQSNGETALMKACKRGNSDIVRLVIECGADCNILSKHQNSALHFAKQSNNVLVYDLLK |
| | | NHLETLSRVAEETIKDYFEARLALLEPVFPIACHRLCEGPDFSTDFNYKPPQNIPEGSGI |
| | | LLFIFHANFLGKEVIARLCGPCSVQAVVLNDKFQLPVFLDSHFVYSFSPVAGPNKLFIRL |
| | | TEAPSAKVKLLIGAYRVQLQ |
| 559 | SUMO3 (Rad60- | MSEEKPKEGVKTENDHINLKVAGQDGSVVQFKIKRHTPLSKLMKAYCERQGLSMRQIRFR |
| | SLD) | FDGQPINETDTPAQLEMEDEDTIDVFQQQTGGVPESSLAGHSF |
| 560 | HERC2 (Cyt-b5) | MPSESFCLAAQARLDSKWLKTDIQLAFTRDGLCGLWNEMVKDGEIVYTGTESTQNGELPP |
| | | RKDDSVEPSGTKKEDLNDKEKKDEEETPAPIYRAKSILDSWVWGKQPDVNELKECLSVLV |
| | | KEQQALAVQSATTTLSALRLKQRLVILERYFIALNRTVFQENVKVKWKSSGISLPPVDKK |
| | | SSRPAGKGVEGLARVGSRAALSFAFAFLRRAWRSGEDADLCSELLQESLDALRALPEASL |
| | | FDESTVSSVWLEVVERATRFLRSVVTGDVHGTPATKGPGSIPLQDQHLALAILLELAVQR |
| | | GTLSQMLSAILLLLQLWDSGAQETDNERSAQGTSAPLLPLLQRFQSIICRKDAPHSEGDM |
| | | HLLSGPLSPNESFLRYLTLPQDNELAIDLRQTAVVVMAHLDRLATPCMPPLCSSPTSHKG |
| | | SLQEVIGWGLIGWKYYANVIGPIQCEGLANLGVTQIACAEKRFLILSRNGRVYTQAYNSD |
| | | TLAPQLVQGLASRNIVKIAAHSDGHHYLALAATGEVYSWGCGDGGRLGHGDTVPLEEPKV |
| | | ISAFSGKQAGKHVVHIACGSTYSAAITAEGELYTWGRGNYGRLGHGSSEDEAIPMLVAGL |
| | | KGLKVIDVACGSGDAQTLAVTENGQVWSWGDGDYGKLGRGGSDGCKTPKLIEKLQDLDVV |
| | | KVRCGSQFSIALTKDGQVYSWGKGDNQRLGHGTEEHVRYPKLLEGLQGKKVIDVAAGSTH |
| | | CLALTEDSEVHSWGSNDQCQHFDTLRVTKPEPAALPGLDTKHIVGIACGPAQSFAWSSCS |
| | | EWSIGLRVPFVVDICSMTFEQLDLLLRQVSEGMDGSADWPPPQEKECVAVATLNLLRLQL |
| | | HAAISHQVDPEFLGLGLGSILLNSLKQTVVTLASSAGVLSTVQSAAQAVLQSGWSVLLPT |
| | | AEERARALSALLPCAVSGNEVNISPGRRFMIDLLVGSLMADGGLESALHAAITAEIQDIE |
| | | AKKEAQKEKEIDEQEANASTFHRSRTPLDKDLINTGICESSGKQCLPLVQLIQQLLRNIA |
| | | SQTVARLKDVARRISSCLDFEQHSRERSASLDLLLRFQRLLISKLYPGESIGQTSDISSP |
| | | ELMGVGSLLKKYTALLCTHIGDILPVAASIASTSWRHFAEVAYIVEGDFTGVLLPELVVS |
| | | IVLLLSKNAGLMQEAGAVPLLGGLLEHLDRFNHLAPGKERDDHEELAWPGIMESFFTGQN |
| | | CRNNEEVTLIRKADLENHNKDGGFWTVIDGKVYDIKDFQTQSLTGNSILAQFAGEDPVVA |
| | | LEAALQFEDTRESMHAFCVGQYLEPDQEIVTIPDLGSLSSPLIDTERNLGLLLGLHASYL |
| | | AMSTPLSPVEIECAKWLQSSIFSGGLQTSQIHYSYNEEKDEDHCSSPGGTPASKSRLCSH |
| | | RRALGDHSQAFLQAIADNNIQDHNVKDFLCQIERYCRQCHLTTPIMFPPEHPVEEVGRLL |
| | | LCCLLKHEDLGHVALSLVHAGALGIEQVKHRTLPKSVVDVCRVVYQAKCSLIKTHQEQGR |
| | | SYKEVCAPVIERLRFLFNELRPAVCNDLSIMSKFKLLSSLPRWRRIAQKIIRERRKKRVP |
| | | KKPESTDDEEKIGNEESDLEEACILPHSPINVDKRPIAIKSPKDKWQPLLSTVTGVHKYK |
| | | WLKQNVQGLYPQSPLLSTIAEFALKEEPVDVEKMRKCLLKQLERAEVRLEGIDTILKLAS |
| | | KNFLLPSVQYAMFCGWQRLIPEGIDIGEPLTDCLKDVDLIPPFNRMLLEVTFGKLYAWAV |
| | | QNIRNVLMDASAKFKELGIQPVPLQTITNENPSGPSLGTIPQARFLLVMLSMLTLQHGAN |
| | | NLDLLLNSGMLALTQTALRLIGPSCDNVEEDMNASAQGASATVLEETRKETAPVQLPVSG |
| | | PELAAMMKIGTRVMRGVDWKWGDQDGPPPGLGRVIGELGEDGWIRVQWDTGSTNSYRMGK |
| | | EGKYDLKLAELPAAAQPSAEDSDTEDDSEAEQTERNIHPTAMMFTSTINLLQTLCLSAGV |
| | | HAEIMQSEATKTLCGLLRMLVESGTTDKTSSPNRLVYREQHRSWCTLGFVRSIALTPQVC |
| | | GALSSPQWITLLMKVVEGHAPFTATSLQRQILAVHLLQAVLPSWDKTERARDMKCLVEKL |
| | | FDFLGSLLTTCSSDVPLLRESTLRRRRVRPQASLTATHSSTLAEEVVALLRTLHSLTQWN |
| | | GLINKYINSQLRSITHSFVGRPSEGAQLEDYFPDSENPEVGGLMAVLAVIGGIDGRLRLG |
| | | GQVMHDEFGEGTVTRITPKGKITVQFSDMRTCRVCPLNQLKPLPAVAFNVNNLPFTEPML |
| | | SVWAQLVNLAGSKLEKHKIKKSTKQAFAGQVDLDLLRCQQLKLYILKAGRALLSHQDKLR |
| | | QILSQPAVQETGTVHTDDGAVVSPDLGDMSPEGPQPPMILLQQLLASATQPSPVKAIFDK |
| | | QELEAAALAVCQCLAVESTHPSSPGFEDCSSSEATTPVAVQHIRPARVKRRKQSPVPALP |
| | | IVVQLMEMGFSRRNIEFALKSLTGASGNASSLPGVEALVGWLLDHSDIQVTELSDADTVS |
| | | DEYSDEEVVEDVDDAAYSMSTGAVVTESQTYKKRADFLSNDDYAVYVRENIQVGMMVRCC |
| | | RAYEEVCEGDVGKVIKLDRDGLHDLNVQCDWQQKGGTYWVRYIHVELIGYPPPSSSSHIK |
| | | IGDKVRVKASVTTPKYKWGSVTHQSVGVVKAFSANGKDIIVDFPQQSHWTGLLSEMELVP |
| | | SIHPGVTCDGCQMFPINGSRFKCRNCDDFDFCETCFKTKKHNTRHTFGRINEPGQSAVFC |
| | | GRSGKQLKRCHSSQPGMLLDSWSRMVKSLNVSSSVNQASRLIDGSEPCWQSSGSQGKHWI |
| | | RLEIFPDVLVHRLKMIVDPADSSYMPSLVVVSGGNSLNNLIELKTININPSDTTVPLLND |
| | | CTEYHRYIEIAIKQCRSSGIDCKIHGLILLGRIRAEEEDLAAVPFLASDNEEEEDEKGNS |
| | | GSLIRKKAAGLESAATIRTKVFVWGLNDKDQLGGLKGSKIKVPSFSETLSALNVVQVAGG |
| | | SKSLFAVTVEGKVYACGEATNGRLGLGISSGTVPIPRQITALSSYVVKKVAVHSGGRHAT |
| | | ALTVDGKVFSWGEGDDGKLGHFSRMNCDKPRLIEALKTKRIRDIACGSSHSAALTSSGEL |
| | | YTWGLGEYGRLGHGDNTTQLKPKMVKVLLGHRVIQVACGSRDAQTLALTDEGLVFSWGDG |
| | | DFGKLGRGGSEGCNIPQNIERLNGQGVCQIECGAQFSLALTKSGVVWTWGKGDYFRLGHG |
| | | SDVHVRKPQVVEGLRGKKIVHVAVGALHCLAVTDSGQVYAWGDNDHGQQGNGTTTVNRKP |
| | | TLVQGLEGQKITRVACGSSHSVAWTTVDVATPSVHEPVLFQTARDPLGASYLGVPSDADS |
| | | SAASNKISGASNSKPNRPSLAKILLSLDGNLAKQQALSHILTALQIMYARDAVVGALMPA |
| | | AMIAPVECPSFSSAAPSDASAMASPMNGEECMLAVDIEDRLSPNPWQEKREIVSSEDAVT |
| | | PSAVTPSAPSASARPFIPVTDDLGAASIIAETMTKTKEDVESQNKAAGPEPQALDEFTSL |
| | | LIADDTRVVVDLLKLSVCSRAGDRGRDVLSAVLSGMGTAYPQVADMLLELCVTELEDVAT |
| | | DSQSGRLSSQPVVVESSHPYTDDTSTSGTVKIPGAEGLRVEFDRQCSTERRHDPLTVMDG |
| | | VNRIVSVRSGREWSDWSSELRIPGDELKWKFISDGSVNGWGWRFTVYPIMPAAGPKELLS |
| | | DRCVLSCPSMDLVTCLLDEFLNLASNRSIVPRLAASLAACAQLSALAASHRMWALQRLRK |
| | | LLTTEFGQSININRLLGENDGETRALSFTGSALAALVKGLPEALQRQFEYEDPIVRGGKQ |
| | | LLHSPFFKVLVALACDLELDTLPCCAETHKWAWFRRYCMASRVAVALDKRTPLPRLFLDE |
| | | VAKKIRELMADSENMDVLHESHDIFKREQDEQLVQWMNRRPDDWTLSAGGSGTIYGWGHN |
| | | HRGQLGGIEGAKVKVPTPCEALATLRPVQLIGGEQTLFAVTADGKLYATGYGAGGRLGIG |
| | | GTESVSTPTLLESIQHVFIKKVAVNSGGKHCLALSSEGEVYSWGEAEDGKLGHGNRSPCD |
| | | RPRVIESLRGIEVVDVAAGGAHSACVTAAGDLYTWGKGRYGRLGHSDSEDQLKPKLVEAL |
| | | QGHRVVDIACGSGDAQTLCLTDDDTVWSWGDGDYGKLGRGGSDGCKVPMKIDSLTGLGVV |
| | | KVECGSQFSVALTKSGAVYTWGKGDYHRLGHGSDDHVRRPRQVQGLQGKKVIAIATGSLH |
| | | CVCCTEDGEVYTWGDNDEGQLGDGTTNAIQRPRLVAALQGKKVNRVACGSAHTLAWSTSK |
| | | PASAGKLPAQVPMEYNHLQEIPIIALRNRLLLLHHLSELFCPCIPMFDLEGSLDETGLGP |
| | | SVGFDTLRGILISQGKEAAFRKVVQATMVRDRQHGPVVELNRIQVKRSRSKGGLAGPDGT |
| | | KSVFGQMCAKMSSFGPDSLLLPHRVWKVKFVGESVDDCGGGYSESIAEICEELQNGLTPL |
| | | LIVTPNGRDESGANRDCYLLSPAARAPVHSSMFRFLGVLLGIAIRTGSPLSLNLAEPVWK |
| | | QLAGMSLTIADLSEVDKDFIPGLMYIRDNEATSEEFEAMSLPFTVPSASGQDIQLSSKHT |
| | | HITLDNRAEYVRLAINYRLHEFDEQVAAVREGMARVVPVPLLSLFTGYELETMVCGSPDI |
| | | PLHLLKSVATYKGIEPSASLIQWFWEVMESFSNTERSLFLRFVWGRTRLPRTIADFRGRD |
| | | FVIQVLDKYNPPDHFLPESYTCFFLLKLPRYSCKQVLEEKLKYAIHFCKSIDTDDYARIA |
| | | LTGEPAADDSSDDSDNEDVDSFASDSTQDYLTGH |
| 561 | BIN1 (SH3_9) | MAEMGSKGVTAGKIASNVQKKLTRAQEKVLQKLGKADETKDEQFEQCVQNFNKQLTEGTR |
| | | LQKDLRTYLASVKAMHEASKKLNECLQEVYEPDWPGRDEANKIAENNDLLWMDYHQKLVD |
| | | QALLTMDTYLGQFPDIKSRIAKRGRKLVDYDSARHHYESLQTAKKKDEAKIAKPVSLLEK |
| | | AAPQWCQGKLQAHLVAQTNLLRNQAEEELIKAQKVFEEMNVDLQEELPSLWNSRVGFYVN |
| | | TFQSIAGLEENFHKEMSKLNQNLNDVLVGLEKQHGSNTFTVKAQPSDNAPAKGNKSPSPP |
| | | DGSPAATPEIRVNHEPEPAGGATPGATLPKSPSQLRKGPPVPPPPKHTPSKEVKQEQILS |
| | | LFEDTFVPEISVTTPSQFEAPGPFSEQASLLDLDFDPLPPVTSPVKAPTPSGQSIPWDLW |
| | | EPTESPAGSLPSGEPSAAEGTFAVSWPSQTAEPGPAQPAEASEVAGGTQPAAGAQEPGET |
| | | AASEAASSSLPAVVVETFPATVNGTVEGGSGAGRLDLPPGFMFKVQAQHDYTATDTDELQ |
| | | LKAGDVVLVIPFQNPEEQDEGWLMGVKESDWNQHKELEKCRGVFPENFTERVP |
| 562 | PCGF2 (RING | MHRTTRIKITELNPHLMCALCGGYFIDATTIVECLHSFCKTCIVRYLETNKYCPMCDVQV |
| | finger protein | HKTRPLLSIRSDKTLQDIVYKLVPGLFKDEMKRRRDFYAAYPLTEVPNGSNEDRGEVLEQ |
| | domain) | EKGALSDDEIVSLSIEFYEGARDRDEKKGPLENGDGDKEKTGVRFLRCPAAMTVMHLAKF |
| | | LRNKMDVPSKYKVEVLYEDEPLKEYYTLMDIAYIYPWRRNGPLPLKYRVQPACKRLTLAT |
| | | VPTPSEGTNTSGASECESVSDKAPSPATLPATSSSLPSPATPSHGSPSSHGPPATHPTSP |
| | | TPPSTASGATTAANGGSLNCLQTPSSTSRGRKMTVNGAPVPPLT |
| 563 | TOX (HMG box) | MDVRFYPPPAQPAAAPDAPCLGPSPCLDPYYCNKFDGENMYMSMTEPSQDYVPASQSYPG |
| | | PSLESEDFNIPPITPPSLPDHSLVHLNEVESGYHSLCHPMNHNGLLPFHPQNMDLPEITV |
| | | SNMLGQDGTLLSNSISVMPDIRNPEGTQYSSHPQMAAMRPRGQPADIRQQPGMMPHGQLT |
| | | TINQSQLSAQLGLNMGGSNVPHNSPSPPGSKSATPSPSSSVHEDEGDDTSKINGGEKRPA |
| | | SDMGKKPKTPKKKKKKDPNEPQKPVSAYALFFRDTQAAIKGQNPNATFGEVSKIVASMWD |
| | | GLGEEQKQVYKKKTEAAKKEYLKQLAAYRASLVSKSYSEPVDVKTSQPPQLINSKPSVFH |
| | | GPSQAHSALYLSSHYHQQPGMNPHLTAMHPSLPRNIAPKPNNQMPVTVSIANMAVSPPPP |
| | | LQISPPLHQHLNMQQHQPLTMQQPLGNQLPMQVQSALHSPTMQQGFTLQPDYQTIINPTS |
| | | TAAQVVTQAMEYVRSGCRNPPPQPVDWNNDYCSSGGMQRDKALYLT |
| 564 | FOXA1 (HNF3A C- | MLGTVKMEGHETSDWNSYYADTQEAYSSVPVSNMNSGLGSMNSMNTYMTMNTMTTSGNMT |
| | terminal | PASFNMSYANPGLGAGLSPGAVAGMPGGSAGAMNSMTAAGVTAMGTALSPSGMGAMGAQQ |
| | domain) | AASMNGLGPYAAAMNPCMSPMAYAPSNLGRSRAGGGGDAKTFKRSYPHAKPPYSYISLIT |
| | | MAIQQAPSKMLTLSEIYQWIMDLFPYYRQNQQRWQNSIRHSLSENDCFVKVARSPDKPGK |
| | | GSYWTLHPDSGNMFENGCYLRRQKRFKCEKQPGAGGGGGSGSGGSGAKGGPESRKDPSGA |
| | | SNPSADSPLHRGVHGKTGQLEGAPAPGPAASPQTLDHSGATATGGASELKTPASSTAPPI |
| | | SSGPGALASVPASHPAHGLAPHESQLHLKGDPHYSFNHPFSINNLMSSSEQQHKLDFKAY |
| | | EQALQYSPYGSTLPASLPLGSASVTTRSPIEPSALEPAYYQGVYSRPVLNTS |
| 565 | FOXA2 (HNF3B C- | MLGAVKMEGHEPSDWSSYYAEPEGYSSVSNMNAGLGMNGMNTYMSMSAAAMGSGSGNMSA |
| | terminal | GSMNMSSYVGAGMSPSLAGMSPGAGAMAGMGGSAGAAGVAGMGPHLSPSLSPLGGQAAGA |
| | domain) | MGGLAPYANMNSMSPMYGQAGLSRARDPKTYRRSYTHAKPPYSYISLITMAIQQSPNKML |
| | | TLSEIYQWIMDLFPFYRQNQQRWQNSIRHSLSFNDCFLKVPRSPDKPGKGSFWTLHPDSG |
| | | NMFENGCYLRRQKRFKCEKQLALKEAAGAAGSGKKAAAGAQASQAQLGEAAGPASETPAG |
| | | TESPHSSASPCQEHKRGGLGELKGTPAAALSPPEPAPSPGQQQQAAAHLLGPPHHPGLPP |
| | | EAHLKPEHHYAFNHPFSINNLMSSEQQHHHSHHHHQPHKMDLKAYEQVMHYPGYGSPMPG |
| | | SLAMGPVTNKTGLDASPLAADTSYYQGVYSRPIMNSS |
| 566 | IRF2BP1 (IRF- | MASVQASRRQWCYLCDLPKMPWAMVWDFSEAVCRGCVNFEGADRIELLIDAARQLKRSHV |
| | 2BP1_2 N- | LPEGRSPGPPALKHPATKDLAAAAAQGPQLPPPQAQPQPSGTGGGVSGQDRYDRATSSGR |
| | terminal | LPLPSPALEYTLGSRLANGLGREEAVAEGARRALLGSMPGLMPPGLLAAAVSGLGSRGLT |
| | domain) | LAPGLSPARPLFGSDFEKEKQQRNADCLAELNEAMRGRAEEWHGRPKAVREQLLALSACA |
| | | PFNVRFKKDHGLVGRVFAFDATARPPGYEFELKLFTEYPCGSGNVYAGVLAVARQMFHDA |
| | | LREPGKALASSGFKYLEYERRHGSGEWRQLGELLTDGVRSFREPAPAEALPQQYPEPAPA |
| | | ALCGPPPRAPSRNLAPTPRRRKASPEPEGEAAGKMTTEEQQQRHWVAPGGPYSAETPGVP |
| | | SPIAALKNVAEALGHSPKDPGGGGGPVRAGGASPAASSTAQPPTQHRLVARNGEAEVSPT |
| | | AGAEAVSGGGSGTGATPGAPLCCTLCRERLEDTHFVQCPSVPGHKFCFPCSREFIKAQGP |
| | | AGEVYCPSGDKCPLVGSSVPWAFMQGEIATILAGDIKVKKERDP |
| 567 | IRF2BP2 (IRF- | MAAAVAVAAASRRQSCYLCDLPRMPWAMIWDFTEPVCRGCVNYEGADRVEFVIETARQLK |
| | 2BP1_2 N- | RAHGCFPEGRSPPGAAASAAAKPPPLSAKDILLQQQQQLGHGGPEAAPRAPQALERYPLA |
| | terminal | AAAERPPRLGSDFGSSRPAASLAQPPTPQPPPVNGILVPNGFSKLEEPPELNRQSPNPRR |
| | domain) | GHAVPPTLVPLMNGSATPLPTALGLGGRAAASLAAVSGTAAASLGSAQPTDLGAHKRPAS |
| | | VSSSAAVEHEQREAAAKEKQPPPPAHRGPADSLSTAAGAAELSAEGAGKSRGSGEQDWVN |
| | | RPKTVRDTLLALHQHGHSGPFESKFKKEPALTAGRLLGFEANGANGSKAVARTARKRKPS |
| | | PEPEGEVGPPKINGEAQPWLSTSTEGLKIPMTPTSSFVSPPPPTASPHSNRTTPPEAAQN |
| | | GQSPMAALILVADNAGGSHASKDANQVHSTTRRNSNSPPSPSSMNQRRLGPREVGGQGAG |
| | | NTGGLEPVHPASLPDSSLATSAPLCCTLCHERLEDTHFVQCPSVPSHKFCFPCSRQSIKQ |
| | | QGASGEVYCPSGEKCPLVGSNVPWAFMQGEIATILAGDVKVKKERDS |
| 568 | IRF2BPLIRF- | MSAAQVSSSRRQSCYLCDLPRMPWAMIWDFSEPVCRGCVNYEGADRIEFVIETARQLKRA |
| | 2BP1_2 N- | HGCFQDGRSPGPPPPVGVKTVALSAKEAAAAAAAAAAAAAAAQQQQQQQQQQQQQQQQQQ |
| | terminal domain | QQQQQQQLNHVDGSSKPAVLAAPSGLERYGLSAAAAAAAAAAAAVEQRSRFEYPPPPVSL |
| | | GSSSHTARLPNGLGGPNGFPKPTPEEGPPELNRQSPNSSSAAASVASRRGTHGGLVTGLP |
| | | NPGGGGGPQLTVPPNLLPQTLLNGPASAAVLPPPPPHALGSRGPPTPAPPGAPGGPACLG |
| | | GTPGVSATSSSASSSTSSSVAEVGVGAGGKRPGSVSSTDQERELKEKQRNAEALAELSES |
| | | LRNRAEEWASKPKMVRDTLLTLAGCTPYEVRFKKDHSLLGRVFAFDAVSKPGMDYELKLF |
| | | IEYPTGSGNVYSSASGVAKQMYQDCMKDFGRGLSSGFKYLEYEKKHGSGDWRLLGDLLPE |
| | | AVRFFKEGVPGADMLPQPYLDASCPMLPTALVSLSRAPSAPPGTGALPPAAPSGRGAAAS |
| | | LRKRKASPEPPDSAEGALKLGEEQQRQQWMANQSEALKLTMSAGGFAAPGHAAGGPPPPP |
| | | PPLGPHSNRTTPPESAPQNGPSPMAALMSVADTLGTAHSPKDGSSVHSTTASARRNSSSP |
| | | VSPASVPGQRRLASRNGDLNLQVAPPPPSAHPGMDQVHPQNIPDSPMANSGPLCCTICHE |
| | | RLEDTHFVQCPSVPSHKFCFPCSRESIKAQGATGEVYCPSGEKCPLVGSNVPWAFMQGEI |
| | | ATILAGDVKVKKERDP |
| 569 | HOXA13 | MTASVLLHPRWIEPTVMFLYDNGGGLVADELNKNMEGAAAAAAAAAAAAAAGAGGGGFPH |
| | (homeodomain) | PAAAAAGGNFSVAAAAAAAAAAAANQCRNLMAHPAPLAPGAASAYSSAPGEAPPSAAAAA |
| | | AAAAAAAAAAAAASSSGGPGPAGPAGAEAAKQCSPCSAAAQSSSGPAALPYGYFGSGYYP |
| | | CARMGPHPNAIKSCAQPASAAAAAAFADKYMDTAGPAAEEFSSRAKEFAFYHQGYAAGPY |
| | | HHHQPMPGYLDMPVVPGLGGPGESRHEPLGLPMESYQPWALPNGWNGQMYCPKEQAQPPH |
| | | LWKSTLPDVVSHPSDASSYRRGRKKRVPYTKVQLKELEREYATNKFITKDKRRRISATTN |
| | | LSERQVTIWFQNRRVKEKKVINKLKTTS |
| 570 | HOXB13 | MEPGNYATLDGAKDIEGLLGAGGGRNLVAHSPLTSHPAAPTLMPAVNYAPLDLPGSAEPP |
| | (homeodomain) | KQCHPCPGVPQGTSPAPVPYGYFGGGYYSCRVSRSSLKPCAQAATLAAYPAETPTAGEEY |
| | | PSRPTEFAFYPGYPGTYQPMASYLDVSVVQTLGAPGEPRHDSLLPVDSYQSWALAGGWNS |
| | | QMCCQGEQNPPGPFWKAAFADSSGQHPPDACAFRRGRKKRIPYSKGQLRELEREYAANKE |
| | | ITKDKRRKISAATSLSERQITIWFQNRRVKEKKVLAKVKNSATP |
| 571 | HOXC13 | MTTSLLLHPRWPESLMYVYEDSAAESGIGGGGGGGGGGTGGAGGGCSGASPGKAPSMDGL |
| | (homeodomain) | GSSCPASHCRDLLPHPVLGRPPAPLGAPQGAVYTDIPAPEAARQCAPPPAPPTSSSATLG |
| | | YGYPFGGSYYGCRLSHNVNLQQKPCAYHPGDKYPEPSGALPGDDLSSRAKEFAFYPSFAS |
| | | SYQAMPGYLDVSVVPGISGHPEPRHDALIPVEGYQHWALSNGWDSQVYCSKEQSQSAHLW |
| | | KSPFPDVVPLQPEVSSYRRGRKKRVPYTKVQLKELEKEYAASKFITKEKRRRISATTNLS |
| | | ERQVTIWFQNRRVKEKKVVSKSKAPHLHST |
| 572 | HOXA11 | MDFDERGPCSSNMYLPSCTYYVSGPDFSSLPSFLPQTPSSRPMTYSYSSNLPQVQPVREV |
| | (homeodomain) | TFREYAIEPATKWHPRGNLAHCYSAEELVHRDCLQAPSAAGVPGDVLAKSSANVYHHPTP |
| | | AVSSNFYSTVGRNGVLPQAFDQFFETAYGTPENLASSDYPGDKSAEKGPPAATATSAAAA |
| | | AAATGAPATSSSDSGGGGGCRETAAAAEEKERRRRPESSSSPESSSGHTEDKAGGSSGQR |
| | | TRKKRCPYTKYQIRELEREFFFSVYINKEKRLQLSRMLNLTDRQVKIWFQNRRMKEKKIN |
| | | RDRLQYYSANPLL |
| 573 | HOXC11 | MFNSVNLGNFCSPSRKERGADFGERGSCASNLYLPSCTYYMPEFSTVSSFLPQAPSRQIS |
| | (homeodomain) | YPYSAQVPPVREVSYGLEPSGKWHHRNSYSSCYAAADELMHRECLPPSTVTEILMKNEGS |
| | | YGGHHHPSAPHATPAGFYSSVNKNSVLPQAFDRFFDNAYCGGGDPPAEPPCSGKGEAKGE |
| | | PEAPPASGLASRAEAGAEAEAEEENTNPSSSGSAHSVAKEPAKGAAPNAPRTRKKRCPYS |
| | | KFQIRELEREFFFNVYINKEKRLQLSRMLNLTDRQVKIWFQNRRMKEKKLSRDRLQYFSG |
| | | NPLL |
| 574 | HOXC10 | MTCPRNVTPNSYAEPLAAPGGGERYSRSAGMYMQSGSDFNCGVMRGCGLAPSLSKRDEGS |
| | (homeodomain) | SPSLALNTYPSYLSQLDSWGDPKAAYRLEQPVGRPLSSCSYPPSVKEENVCCMYSAEKRA |
| | | KSGPEAALYSHPLPESCLGEHEVPVPSYYRASPSYSALDKTPHCSGANDFEAPFEQRASL |
| | | NPRAEHLESPQLGGKVSFPETPKSDSQTPSPNEIKTEQSLAGPKGSPSESEKERAKAADS |
| | | SPDTSDNEAKEEIKAENTTGNWLTAKSGRKKRCPYTKHQTLELEKEFLFNMYLTRERRLE |
| | | ISKTINLTDRQVKIWFQNRRMKLKKMNRFNRIRELTSNFNFT |
| 575 | HOXA10 | MSARKGYLLPSPNYPTTMSCSESPAANSFLVDSLISSGRGEAGGGGGGAGGGGGGGYYAH |
| | (homeodomain) | GGVYLPPAADLPYGLQSCGLFPTLGGKRNEAASPGSGGGGGGLGPGAHGYGPSPIDLWLD |
| | | APRSCRMEPPDGPPPPPQQQPPPPPQPPQPAPQATSCSFAQNIKEESSYCLYDSADKCPK |
| | | VSATAAELAPFPRGPPPDGCALGTSSGVPVPGYFRLSQAYGTAKGYGSGGGGAQQLGAGP |
| | | FPAQPPGRGFDLPPALASGSADAARKERALDSPPPPTLACGSGGGSQGDEEAHASSSAAE |
| | | ELSPAPSESSKASPEKDSLGNSKGENAANWLTAKSGRKKRCPYTKHQTLELEKEFLFNMY |
| | | LTRERRLEISRSVHLTDRQVKIWFQNRRMKLKKMNRENRIRELTANFNFS |
| 576 | HOXB9 | MSISGTLSSYYVDSIISHESEDAPPAKFPSGQYASSRQPGHAEHLEFPSCSFQPKAPVFG |
| | (homeodomain) | ASWAPLSPHASGSLPSVYHPYIQPQGVPPAESRYLRTWLEPAPRGEAAPGQGQAAVKAEP |
| | | LLGAPGELLKQGTPEYSLETSAGREAVLSNQRPGYGDNKICEGSEDKERPDQTNPSANWL |
| | | HARSSRKKRCPYTKYQTLELEKEFLFNMYLTRDRRHEVARLLNLSERQVKIWFQNRRMKM |
| | | KKMNKEQGKE |
| 577 | HOXA9 | MATTGALGNYYVDSFLLGADAADELSVGRYAPGTLGQPPRQAATLAEHPDFSPCSFQSKA |
| | (homeodomain) | TVFGASWNPVHAAGANAVPAAVYHHHHHHPYVHPQAPVAAAAPDGRYMRSWLEPTPGALS |
| | | FAGLPSSRPYGIKPEPLSARRGDCPTLDTHTLSLTDYACGSPPVDREKQPSEGAFSENNA |
| | | ENESGGDKPPIDPNNPAANWLHARSTRKKRCPYTKHQTLELEKEFLFNMYLTRDRRYEVA |
| | | RLLNLTERQVKIWFQNRRMKMKKINKDRAKDE |
| 578 | ZFP28_HUMAN | NKKLEAVGTGIEPKAMSQGLVTFGDVAVDFSQEEWEWLNPIQRNLYRKVMLENYRNLASL |
| | | GLCVSKPDVISSLEQGKEPW |
| 579 | ZN334_HUMAN | KMKKFQIPVSFQDLTVNFTQEEWQQLDPAQRLLYRDVMLENYSNLVSVGYHVSKPDVIFK |
| | | LEQGEEPWIVEEFSNQNYPD |
| 580 | ZN568_HUMAN | CSQESALSEEEEDTTRPLETVTFKDVAVDLTQEEWEQMKPAQRNLYRDVMLENYSNLVTV |
| | | GCQVTKPDVIFKLEQEEEPW |
| 581 | ZN37A_HUMAN | ITSQGSVSFRDVTVGFTQEEWQHLDPAQRTLYRDVMLENYSHLVSVGYCIPKPEVILKLE |
| | | KGEEPWILEEKFPSQSHLEL |
| 582 | ZN181_HUMAN | PQVTFNDVAIDFTHEEWGWLSSAQRDLYKDVMVQNYENLVSVAGLSVTKPYVITLLEDGK |
| | | EPWMMEKKLSKGMIPDWESR |
| 583 | ZN510_HUMAN | PLRFSTLFQEQQKMNISQASVSFKDVTIEFTQEEWQQMAPVQKNLYRDVMLENYSNLVSV |
| | | GYCCFKPEVIFKLEQGEEPW |
| 584 | ZN862_HUMAN | QDPSAEGLSEEVPVVFEELPVVFEDVAVYFTREEWGMLDKRQKELYRDVMRMNYELLASL |
| | | GPAAAKPDLISKLERRAAPW |
| 585 | ZN140_HUMAN | SQGSVTFRDVAIDFSQEEWKWLQPAQRDLYRCVMLENYGHLVSLGLSISKPDVVSLLEQG |
| | | KEPWLGKREVKRDLFSVSES |
| 586 | ZN208_HUMAN | GSLTFRDVAIEFSLEEWQCLDTAQQNLYRNVMLENYRNLVFLGIAAFKPDLIIFLEEGKE |
| | | SWNMKRHEMVEESPVICSHF |
| 587 | ZN248_HUMAN | NKSQEQVSFKDVCVDFTQEEWYLLDPAQKILYRDVILENYSNLVSVGYCITKPEVIFKIE |
| | | QGEEPWILEKGFPSQCHPER |
| 588 | ZN571_HUMAN | PHLLVTFRDVAIDFSQEEWECLDPAQRDLYRDVMLENYSNLISLDLESSCVTKKLSPEKE |
| | | IYEMESLQWENMGKRINHHL |
| 589 | ZN699_HUMAN | EEERKTAELQKNRIQDSVVFEDVAVDFTQEEWALLDLAQRNLYRDVMLENFQNLASLGYP |
| | | LHTPHLISQWEQEEDLQTVK |
| 590 | ZN726_HUMAN | GLLTFRDVAIEFSLEEWQCLDTAQKNLYRNVMLENYRNLAFLGIAVSKPDLIICLEKEKE |
| | | PWNMKRDEMVDEPPGICPHF |
| 591 | ZIK1_HUMAN | RAPTQVTVSPETHMDLTKGCVTFEDIAIYFSQDEWGLLDEAQRLLYLEVMLENFALVASL |
| | | GCGHGTEDEETPSDQNVSVG |
| 592 | ZNF2_HUMAN | AAVSPTTRCQESVTFEDVAVVFTDEEWSRLVPIQRDLYKEVMLENYNSIVSLGLPVPQPD |
| | | VIFQLKRGDKPWMVDLHGSE |
| 593 | Z705F_HUMAN | HSLEKVTFEDVAIDFTQEEWDMMDTSKRKLYRDVMLENISHLVSLGYQISKSYIILQLEQ |
| | | GKELWREGRVFLQDQNPDRE |
| 594 | ZNF14_HUMAN | DSVSFEDVAVNFTLEEWALLDSSQKKLYEDVMQETFKNLVCLGKKWEDQDIEDDHRNQGK |
| | | NRRCHMVERLCESRRGSKCG |
| 595 | ZN471_HUMAN | NVEVVKVMPQDLVTFKDVAIDFSQEEWQWMNPAQKRLYRSMMLENYQSLVSLGLCISKPY |
| | | VISLLEQGREPWEMTSEMTR |
| 596 | ZN624_HUMAN | TQPDEDLHLQAEETQLVKESVTFKDVAIDFTLEEWRLMDPTQRNLHKDVMLENYRNLVSL |
| | | GLAVSKPDMISHLENGKGPW |
| 597 | ZNF84_HUMAN | TMLQESFSFDDLSVDFTQKEWQLLDPSQKNLYKDVMLENYSSLVSLGYEVMKPDVIFKLE |
| | | QGEEPWVGDGEIPSSDSPEV |
| 598 | ZNF7_HUMAN | EVVTFGDVAVHFSREEWQCLDPGQRALYREVMLENHSSVAGLAGFLVEKPELISRLEQGE |
| | | EPWVLDLQGAEGTEAPRTSK |
| 599 | ZN891_HUMAN | RNAEEERMIAVFLTTWLQEPMTFKDVAVEFTQEEWMMLDSAQRSLYRDVMLENYRNLTSV |
| | | EYQLYRLTVISPLDQEEIRN |
| 600 | ZN337_HUMAN | GPQGARRQAFLAFGDVTVDFTQKEWRLLSPAQRALYREVTLENYSHLVSLGILHSKPELI |
| | | RRLEQGEVPWGEERRRRPGP |
| 601 | Z705G_HUMAN | HSLKKLTFEDVAIDFTQEEWAMMDTSKRKLYRDVMLENISHLVSLGYQISKSYIILQLEQ |
| | | GKELWREGRVFLQDQNPNRE |
| 602 | ZN529_HUMAN | MPEVEFPDQFFTVLTMDHELVTLRDVVINFSQEEWEYLDSAQRNLYWDVMMENYSNLLSL |
| | | DLESRNETKHLSVGKDIIQN |
| 603 | ZN729_HUMAN | PGAPGSLEMGPLTFRDVTIEFSLEEWQCLDTVQQNLYRDVMLENYRNLVFLGMAVFKPDL |
| | | ITCLKQGKEPWNMKRHEMVT |
| 604 | ZN419_HUMAN | RDPAQVPVAADLLTDHEEGYVTFEDVAVYFSQEEWRLLDDAQRLLYRNVMLENFTLLASL |
| | | GLASSKTHEITQLESWEEPF |
| 605 | Z705A_HUMAN | HSLKKVTFEDVAIDFTQEEWAMMDTSKRKLYRDVMLENISHLVSLGYQISKSYIILQLEQ |
| | | GKELWREGREFLQDQNPDRE |
| 606 | ZNF45_HUMAN | TKSKEAVTFKDVAVVFSEEELQLLDLAQRKLYRDVMLENFRNVVSVGHQSTPDGLPQLER |
| | | EEKLWMMKMATQRDNSSGAK |
| 607 | ZN302_HUMAN | SQVTFSDVAIDFSHEEWACLDSAQRDLYKDVMVQNYENLVSVGLSVTKPYVIMLLEDGKE |
| | | PWMMEKKLSKAYPFPLSHSV |
| 608 | ZN486_HUMAN | PGPLRSLEMESLQFRDVAVEFSLEEWHCLDTAQQNLYRDVMLENYRHLVFLGIIVSKPDL |
| | | ITCLEQGIKPLTMKRHEMIA |
| 609 | ZN621_HUMAN | LQTTWPQESVTFEDVAVYFTQNQWASLDPAQRALYGEVMLENYANVASLVAFPFPKPALI |
| | | SHLERGEAPWGPDPWDTEIL |
| 610 | ZN688_HUMAN | APLLAPRPGETRPGCRKPGTVSFADVAVYFSPEEWGCLRPAQRALYRDVMQETYGHLGAL |
| | | GFPGPKPALISWMEQESEAW |
| 611 | ZN33A_HUMAN | NKVEQKSQESVSFKDVTVGFTQEEWQHLDPSQRALYRDVMLENYSNLVSVGYCVHKPEVI |
| | | FRLQQGEEPWKQEEEFPSQS |
| 612 | ZN554_HUMAN | CFSQEERMAAGYLPRWSQELVTFEDVSMDFSQEEWELLEPAQKNLYREVMLENYRNVVSL |
| | | EALKNQCTDVGIKEGPLSPA |
| 613 | ZN878_HUMAN | DSVAFEDVAVNFTQEEWALLDPSQKNLYREVMQETLRNLTSIGKKWNNQYIEDEHQNPRR |
| | | NLRRLIGERLSESKESHQHG |
| 614 | ZN772_HUMAN | MGPAQVPMNSEVIVDPIQGQVNFEDVEVYFSQEEWVLLDEAQRLLYRDVMLENFALMASL |
| | | GHTSFMSHIVASLVMGSEPW |
| 615 | ZN224_HUMAN | TTFKEAMTFKDVAVVFTEEELGLLDLAQRKLYRDVMLENFRNLLSVGHQAFHRDTFHFLR |
| | | EEKIWMMKTAIQREGNSGDK |
| 616 | ZN184_HUMAN | DSTLLQGGHNLLSSASFQEAVTFKDVIVDFTQEEWKQLDPGQRDLFRDVTLENYTHLVSI |
| | | GLQVSKPDVISQLEQGTEPW |
| 617 | ZN544_HUMAN | EARSMLVPPQASVCFEDVAMAFTQEEWEQLDLAQRTLYREVTLETWEHIVSLGLFLSKSD |
| | | VISQLEQEEDLCRAEQEAPR |
| 618 | ZNF57_HUMAN | DSVVFEDVAVDFTLEEWALLDSAQRDLYRDVMLETFRNLASVDDGTQFKANGSVSLQDMY |
| | | GQEKSKEQTIPNFTGNNSCA |
| 619 | ZN283_HUMAN | EESHGALISSCNSRTMTDGLVTFRDVAIDESQEEWECLDPAQRDLYVDVMLENYSNLVSL |
| | | DLESKTYETKKIFSENDIFE |
| 620 | ZN549_HUMAN | VITPQIPMVTEEFVKPSQGHVTFEDIAVYFSQEEWGLLDEAQRCLYHDVMLENFSLMASV |
| | | GCLHGIEAEEAPSEQTLSAQ |
| 621 | ZN211_HUMAN | VQLRPQTRMATALRDPASGSVTFEDVAVYFSWEEWDLLDEAQKHLYFDVMLENFALTSSL |
| | | GCWCGVEHEETPSEQRISGE |
| 622 | ZN615_HUMAN | MQAQESLTLEDVAVDFTWEEWQFLSPAQKDLYRDVMLENYSNLVAVGYQASKPDALSKLE |
| | | RGEETCTTEDEIYSRICSEI |
| 623 | ZN253_HUMAN | GPLQFRDVAIEFSLEEWHCLDTAQRNLYRDVMLENYRNLVFLGIVVSKPDLVTCLEQGKK |
| | | PLTMERHEMIAKPPVMSSHF |
| 624 | ZN226_HUMAN | NMFKEAVTFKDVAVAFTEEELGLLGPAQRKLYRDVMVENFRNLLSVGHPPFKQDVSPIER |
| | | NEQLWIMTTATRRQGNLGEK |
| 625 | ZN730_HUMAN | GALTFRDVAIEFSLEEWQCLDTEQQNLYRNVMLDNYRNLVFLGIAVSKPDLITCLEQEKE |
| | | PWNLKTHDMVAKPPVICSHI |
| 626 | Z585A_HUMAN | SPQKSSALAPEDHGSSYEGSVSFRDVAIDFSREEWRHLDPSQRNLYRDVMLETYSHLLSV |
| | | GYQVPEAEVVMLEQGKEPWA |
| 627 | ZN732_HUMAN | ELLTFRDVAIEFSPEEWKCLDPAQQNLYRDVMLENYRNLISLGVAISNPDLVIYLEQRKE |
| | | PYKVKIHETVAKHPAVCSHF |
| 628 | ZN681_HUMAN | EPLKFRDVAIEFSLEEWQCLDTIQQNLYRNVMLENYRNLVFLGIVVSKPDLITCLEQEKE |
| | | PWTRKRHRMVAEPPVICSHF |
| 629 | ZN667_HUMAN | PSARGKSKSKAPITFGDLAIYFSQEEWEWLSPIQKDLYEDVMLENYRNLVSLGLSFRRPN |
| | | VITLLEKGKAPWMVEPVRRR |
| 630 | ZN649_HUMAN | TKAQESLTLEDVAVDFTWEEWQFLSPAQKDLYRDVMLENYSNLVSVGYQAGKPDALTKLE |
| | | QGEPLWTLEDEIHSPAHPEI |
| 631 | ZN470_HUMAN | SQEEVEVAGIKLCKAMSLGSVTFTDVAIDFSQDEWEWLNLAQRSLYKKVMLENYRNLVSV |
| | | GLCISKPDVISLLEQEKDPW |
| 632 | ZN484_HUMAN | TKSLESVSFKDVTVDFSRDEWQQLDLAQKSLYREVMLENYFNLISVGCQVPKPEVIFSLE |
| | | QEEPCMLDGEIPSQSRPDGD |
| 633 | ZN431_HUMAN | SGCPGAERNLLVYSYFEKETLTFRDVAIEFSLEEWECLNPAQQNLYMNVMLENYKNLVFL |
| | | GVAVSKQDPVTCLEQEKEPW |
| 634 | ZN382_HUMAN | PLQGSVSFKDVTVDFTQEEWQQLDPAQKALYRDVMLENYCHFVSVGFHMAKPDMIRKLEQ |
| | | GEELWTQRIFPSYSYLEEDG |
| 635 | ZN254_HUMAN | PGPPRSLEMGLLTFRDVAIEFSLEEWQHLDIAQQNLYRNVMLENYRNLAFLGIAVSKPDL |
| | | ITCLEQGKEPWNMKRHEMVD |
| 636 | ZN124_HUMAN | SGHPGSWEMNSVAFEDVAVNFTQEEWALLDPSQKNLYRDVMQETFRNLASIGNKGEDQSI |
| | | EDQYKNSSRNLRHIISHSGN |
| 637 | ZN607_HUMAN | SYGSITFGDVAIDFSHQEWEYLSLVQKTLYQEVMMENYDNLVSLAGHSVSKPDLITLLEQ |
| | | GKEPWMIVREETRGECTDLD |
| 638 | ZN317_HUMAN | DLFVCSGLEPHTPSVGSQESVTFQDVAVDFTEKEWPLLDSSQRKLYKDVMLENYSNLTSL |
| | | GYQVGKPSLISHLEQEEEPR |
| 639 | ZN620_HUMAN | FQTAWRQEPVTFEDVAVYFTQNEWASLDSVQRALYREVMLENYANVASLAFPFTTPVLVS |
| | | QLEQGELPWGLDPWEPMGRE |
| 640 | ZN141_HUMAN | ELLTFRDVAIEFSPEEWKCLDPDQQNLYRDVMLENYRNLVSLGVAISNPDLVTCLEQRKE |
| | | PYNVKIHKIVARPPAMCSHF |
| 641 | ZN584_HUMAN | AGEAEAQLDPSLQGLVMFEDVTVYFSREEWGLLNVTQKGLYRDVMLENFALVSSLGLAPS |
| | | RSPVFTQLFDDEQSWVPSWV |
| 642 | ZN540_HUMAN | AHALVTFRDVAIDFSQKEWECLDTTQRKLYRDVMLENYNNLVSLGYSGSKPDVITLLEQG |
| | | KEPCVVARDVTGRQCPGLLS |
| 643 | ZN75D_HUMAN | KRIKHWKMASKLILPESLSLLTFEDVAVYFSEEEWQLLNPLEKTLYNDVMQDIYETVISL |
| | | GLKLKNDTGNDHPISVSTSE |
| 644 | ZN555_HUMAN | DSVVFEDVAVDFTLEEWALLDSAQRDLYRDVMLETFQNLASVDDETQFKASGSVSQQDIY |
| | | GEKIPKESKIATFTRNVSWA |
| 645 | ZN658_HUMAN | NMSQASVSFQDVTVEFTREEWQHLGPVERTLYRDVMLENYSHLISVGYCITKPKVISKLE |
| | | KGEEPWSLEDEFLNQRYPGY |
| 646 | ZN684_HUMAN | ISFQESVTFQDVAVDFTAEEWQLLDCAERTLYWDVMLENYRNLISVGCPITKTKVILKVE |
| | | QGQEPWMVEGANPHESSPES |
| 647 | RBAK_HUMAN | NTLQGPVSFKDVAVDFTQEEWQQLDPDEKITYRDVMLENYSHLVSVGYDTTKPNVIIKLE |
| | | QGEEPWIMGGEFPCQHSPEA |
| 648 | ZN829_HUMAN | HPEEEERMHDELLQAVSKGPVMFRDVSIDFSQEEWECLDADQMNLYKEVMLENFSNLVSV |
| | | GLSNSKPAVISLLEQGKEPW |
| 649 | ZN582_HUMAN | SLGSELFRDVAIVFSQEEWQWLAPAQRDLYRDVMLETYSNLVSLGLAVSKPDVISFLEQG |
| | | KEPWMVERVVSGGLCPVLES |
| 650 | ZN112_HUMAN | TKFQEMVTFKDVAVVFTEEELGLLDSVQRKLYRDVMLENFRNLLLVAHQPFKPDLISQLE |
| | | REEKLLMVETETPRDGCSGR |
| 651 | ZN716_HUMAN | AKRPGPPGSREMGLLTFRDIAIEFSLAEWQCLDHAQQNLYRDVMLENYRNLVSLGIAVSK |
| | | PDLITCLEQNKEPQNIKRNE |
| 652 | HKR1_HUMAN | TCMVHRQTMSCSGAGGITAFVAFRDVAVYFTQEEWRLLSPAQRTLHREVMLETYNHLVSL |
| | | EIPSSKPKLIAQLERGEAPW |
| 653 | ZN350_HUMAN | IQAQESITLEDVAVDFTWEEWQLLGAAQKDLYRDVMLENYSNLVAVGYQASKPDALFKLE |
| | | QGEQLWTIEDGIHSGACSDI |
| 654 | ZN480_HUMAN | AQKRRKRKAKESGMALPQGHLTFRDVAIEFSQAEWKCLDPAQRALYKDVMLENYRNLVSL |
| | | GISLPDLNINSMLEQRREPW |
| 655 | ZN416_HUMAN | DSTSVPVTAEAKLMGFTQGCVTFEDVAIYFSQEEWGLLDEAQRLLYRDVMLENFALITAL |
| | | VCWHGMEDEETPEQSVSVEG |
| 656 | ZNF92_HUMAN | GPLTFRDVKIEFSLEEWQCLDTAQRNLYRDVMLENYRNLVFLGIAVSKPDLITWLEQGKE |
| | | PWNLKRHEMVDKTPVMCSHF |
| 657 | ZN100_HUMAN | SGCPGAERSLLVQSYFEKGPLTFRDVAIEFSLEEWQCLDSAQQGLYRKVMLENYRNLVFL |
| | | AGIALTKPDLITCLEQGKEP |
| 658 | ZN736_HUMAN | GVLTFRDVAVEFSPEEWECLDSAQQRLYRDVMLENYGNLVSLGLAIFKPDLMTCLEQRKE |
| | | PWKVKRQEAVAKHPAGSFHF |
| 659 | ZNF74_HUMAN | KENLEDISGWGLPEARSKESVSFKDVAVDFTQEEWGQLDSPQRALYRDVMLENYQNLLAL |
| | | GPPLHKPDVISHLERGEEPW |
| 660 | CBX1_HUMAN | EESEKPRGFARGLEPERIIGATDSSGELMFLMKWKNSDEADLVPAKEANVKCPQVVISFY |
| | | EERLTWHSYPSEDDDKKDDK |
| 661 | ZN443_HUMAN | ASVALEDVAVNFTREEWALLGPCQKNLYKDVMQETIRNLDCVVMKWKDQNIEDQYRYPRK |
| | | NLRCRMLERFVESKDGTQCG |
| 662 | ZN195_HUMAN | TLLTFRDVAIEFSLEEWKCLDLAQQNLYRDVMLENYRNLFSVGLTVCKPGLITCLEQRKE |
| | | PWNVKRQEAADGHPEMGFHH |
| 663 | ZN530_HUMAN | AAALRAPTQQVEVAFEDVAIYFSQEEWELLDEMQRLLYRDVMLENFAVMASLGCWCGAVD |
| | | EGTPSAESVSVEELSQGRTP |
| 664 | ZN782_HUMAN | NTFQASVSFQDVTVEFSQEEWQHMGPVERTLYRDVMLENYSHLVSVGYCFTKPELIFTLE |
| | | QGEDPWLLEKEKGFLSRNSP |
| 665 | ZN791_HUMAN | DSVAFEDVSVSFSQEEWALLAPSQKKLYRDVMQETFKNLASIGEKWEDPNVEDQHKNQGR |
| | | NLRSHTGERLCEGKEGSQCA |
| 666 | ZN331_HUMAN | AQGLVTFADVAIDFSQEEWACLNSAQRDLYWDVMLENYSNLVSLDLESAYENKSLPTEKN |
| | | IHEIRASKRNSDRRSKSLGR |
| 667 | Z354C_HUMAN | AVDLLSAQEPVTFRDVAVFFSQDEWLHLDSAQRALYREVMLENYSSLVSLGIPFSMPKLI |
| | | HQLQQGEDPCMVEREVPSDT |
| 668 | ZN157_HUMAN | SPQRFPALIPGEPGRSFEGSVSFEDVAVDFTRQEWHRLDPAQRTMHKDVMLETYSNLASV |
| | | GLCVAKPEMIFKLERGEELW |
| 669 | ZN727_HUMAN | RVLTFRDVAVEFSPEEWECLDSAQQRLYRDVMLENYGNLFSLGLAIFKPDLITYLEQRKE |
| | | PWNARRQKTVAKHPAGSLHF |
| 670 | ZN550_HUMAN | AETKDAAQMLVTFKDVAVTFTREEWRQLDLAQRTLYREVMLETCGLLVSLGHRVPKPELV |
| | | HLLEHGQELWIVKRGLSHAT |
| 671 | ZN793_HUMAN | IEYQIPVSFKDVVVGFTQEEWHRLSPAQRALYRDVMLETYSNLVSVGYEGTKPDVILRLE |
| | | QEEAPWIGEAACPGCHCWED |
| 672 | ZN235_HUMAN | TKFQEAVTFKDVAVAFTEEELGLLDSAQRKLYRDVMLENFRNLVSVGHQSFKPDMISQLE |
| | | REEKLWMKELQTQRGKHSGD |
| 673 | ZNF8_HUMAN | DEGVAGVMSVGPPAARLQEPVTFRDVAVDFTQEEWGQLDPTQRILYRDVMLETFGHLLSI |
| | | GPELPKPEVISQLEQGTELW |
| 674 | ZN724_HUMAN | GPLTFMDVAIEFSVEEWQCLDTAQQNLYRNVMLENYRNLVFLGIAVSKPDLITCLEQGKE |
| | | PWNMERHEMVAKPPGMCCYF |
| 675 | ZN573_HUMAN | HQVGLIRSYNSKTMTCFQELVTFRDVAIDFSRQEWEYLDPNQRDLYRDVMLENYRNLVSL |
| | | GGHSISKPVVVDLLERGKEP |
| 676 | ZN577_HUMAN | NATIVMSVRREQGSSSGEGSLSFEDVAVGFTREEWQFLDQSQKVLYKEVMLENYINLVSI |
| | | GYRGTKPDSLFKLEQGEPPG |
| 677 | ZN789_HUMAN | FPPARGKELLSFEDVAMYFTREEWGHLNWGQKDLYRDVMLENYRNMVLLGFQFPKPEMIC |
| | | QLENWDEQWILDLPRTGNRK |
| 678 | ZN718_HUMAN | ELLTFKDVAIEFSPEEWKCLDTSQQNLYRDVMLENYRNLVSLGVSISNPDLVTSLEQRKE |
| | | PYNLKIHETAARPPAVCSHF |
| 679 | ZN300_HUMAN | MKSQGLVSFKDVAVDFTQEEWQQLDPSQRTLYRDVMLENYSHLVSMGYPVSKPDVISKLE |
| | | QGEEPWIIKGDISNWIYPDE |
| 680 | ZN383_HUMAN | AEGSVMFSDVSIDFSQEEWDCLDPVQRDLYRDVMLENYGNLVSMGLYTPKPQVISLLEQG |
| | | KEPWMVGRELTRGLCSDLES |
| 681 | ZN429_HUMAN | GPLTFTDVAIEFSLEEWQCLDTAQQNLYRNVMLENYRNLVFLGIAVSKPDLITCLEKEKE |
| | | PCKMKRHEMVDEPPVVCSHF |
| 682 | ZN677_HUMAN | ALSQGLFTFKDVAIEFSQEEWECLDPAQRALYRDVMLENYRNLLSLDEDNIPPEDDISVG |
| | | FTSKGLSPKENNKEELYHLV |
| 683 | ZN850_HUMAN | NMEGLVMFQDLSIDFSQEEWECLDAAQKDLYRDVMMENYSSLVSLGLSIPKPDVISLLEQ |
| | | GKEPWMVSRDVLGGWCRDSE |
| 684 | ZN454_HUMAN | AVSHLPTMVQESVTFKDVAILFTQEEWGQLSPAQRALYRDVMLENYSNLVSLGLLGPKPD |
| | | TFSQLEKREVWMPEDTPGGF |
| 685 | ZN257_HUMAN | GPLTIRDVTVEFSLEEWHCLDTAQQNLYRDVMLENYRNLVFLGIAVSKPDLITCLEQGKE |
| | | PCNMKRHEMVAKPPVMCSHI |
| 686 | ZN264_HUMAN | AAAVLTDRAQVSVTFDDVAVTFTKEEWGQLDLAQRTLYQEVMLENCGLLVSLGCPVPKAE |
| | | LICHLEHGQEPWTRKEDLSQ |
| 687 | ZFP82_HUMAN | ALRSVMFSDVSIDFSPEEWEYLDLEQKDLYRDVMLENYSNLVSLGCFISKPDVISSLEQG |
| | | KEPWKVVRKGRRQYPDLETK |
| 688 | ZFP14_HUMAN | AHGSVTFRDVAIDFSQEEWEFLDPAQRDLYRDVMWENYSNFISLGPSISKPDVITLLDEE |
| | | RKEPGMVVREGTRRYCPDLE |
| 689 | ZN485_HUMAN | APRAQIQGPLTFGDVAVAFTRIEWRHLDAAQRALYRDVMLENYGNLVSVGLLSSKPKLIT |
| | | QLEQGAEPWTEVREAPSGTH |
| 690 | ZN737_HUMAN | GPLQFRDVAIEFSLEEWHCLDTAQRNLYRNVMLENYRNLVFLGIVVSKPDLITCLEQGKK |
| | | PLTMKKHEMVANPSVTCSHF |
| 691 | ZNF44_HUMAN | TLPRGQPEVLEWGLPKDQDSVAFEDVAVNFTHEEWALLGPSQKNLYRDVMRETIRNLNCI |
| | | GMKWENQNIDDQHQNLRRNP |
| 692 | ZN596_HUMAN | PSPDSMTFEDIIVDFTQEEWALLDTSQRKLFQDVMLENISHLVSIGKQLCKSVVLSQLEQ |
| | | VEKLSTQRISLLQGREVGIK |
| 693 | ZN565_HUMAN | EESREIRAGQIVLKAMAQGLVTFRDVAIEFSLEEWKCLEPAQRDLYREVTLENFGHLASL |
| | | GLSISKPDVVSLLEQGKEPW |
| 694 | ZN543_HUMAN | AASAQVSVTFEDVAVTFTQEEWGQLDAAQRTLYQEVMLETCGLLMSLGCPLFKPELIYQL |
| | | DHRQELWMATKDLSQSSYPG |
| 695 | ZFP69_HUMAN | RESLEDEVTPGLPTAESQELLTFKDISIDFTQEEWGQLAPAHQNLYREVMLENYSNLVSV |
| | | GYQLSKPSVISQLEKGEEPW |
| 696 | SUMO1_HUMAN | EGEYIKLKVIGQDSSEIHFKVKMTTHLKKLKESYCQRQGVPMNSLRFLFEGQRIADNHTP |
| | | KELGMEEEDVIEVYQEQTGG |
| 697 | ZNF12_HUMAN | NKSLGPVSFKDVAVDFTQEEWQQLDPEQKITYRDVMLENYSNLVSVGYHIIKPDVISKLE |
| | | QGEEPWIVEGEFLLQSYPDE |
| 698 | ZN169_HUMAN | SPGLLTTRKEALMAFRDVAVAFTQKEWKLLSSAQRTLYREVMLENYSHLVSLGIAFSKPK |
| | | LIEQLEQGDEPWREENEHLL |
| 699 | ZN433_HUMAN | MFQDSVAFEDVAVTFTQEEWALLDPSQKNLCRDVMQETFRNLASIGKKWKPQNIYVEYEN |
| | | LRRNLRIVGERLFESKEGHQ |
| 700 | SUMO3_HUMAN | ENDHINLKVAGQDGSVVQFKIKRHTPLSKLMKAYCERQGLSMRQIRFRFDGQPINETDTP |
| | | AQLEMEDEDTIDVFQQQTGG |
| 701 | ZNF98_HUMAN | PGPLGSLEMGVLTFRDVALEFSLEEWQCLDTAQQNLYRNVMLENYRNLVFVGIAASKPDL |
| | | ITCLEQGKEPWNVKRHEMVT |
| 702 | ZN175_HUMAN | LSQKPQVLGPEKQDGSCEASVSFEDVTVDFSREEWQQLDPAQRCLYRDVMLELYSHLFAV |
| | | GYHIPNPEVIFRMLKEKEPR |
| 703 | ZN347_HUMAN | ALTQGQVTFRDVAIEFSQEEWTCLDPAQRTLYRDVMLENYRNLASLGISCFDLSIISMLE |
| | | QGKEPFTLESQVQIAGNPDG |
| 704 | ZNF25_HUMAN | NKFQGPVTLKDVIVEFTKEEWKLLTPAQRTLYKDVMLENYSHLVSVGYHVNKPNAVFKLK |
| | | QGKEPWILEVEFPHRGFPED |
| 705 | ZN519_HUMAN | ELLTFRDVAIEFSPEEWKCLDPAQQNLYRDVMLENYRNLVSLAVYSYYNQGILPEQGIQD |
| | | SFKKATLGRYGSCGLENICL |
| 706 | Z585B_HUMAN | SPQKSSALAPEDHGSSYEGSVSFRDVAIDFSREEWRHLDLSQRNLYRDVMLETYSHLLSV |
| | | GYQVPKPEVVMLEQGKEPWA |
| 707 | ZIM3_HUMAN | NNSQGRVTFEDVTVNFTQGEWQRLNPEQRNLYRDVMLENYSNLVSVGQGETTKPDVILRL |
| | | EQGKEPWLEEEEVLGSGRAE |
| 708 | ZN517_HUMAN | AMALPMPGPQEAVVFEDVAVYFTRIEWSCLAPDQQALYRDVMLENYGNLASLGFLVAKPA |
| | | LISLLEQGEEPGALILQVAE |
| 709 | ZN846_HUMAN | DSSQHLVTFEDVAVDFTQEEWTLLDQAQRDLYRDVMLENYKNLIILAGSELFKRSLMSGL |
| | | EQMEELRTGVTGVLQELDLQ |
| 710 | ZN230_HUMAN | TTFKEAVTFKDVAVFFTEEELGLLDPAQRKLYQDVMLENFTNLLSVGHQPFHPFHFLREE |
| | | KFWMMETATQREGNSGGKTI |
| 711 | ZNF66_HUMAN | GPLQFRDVAIEFSLEEWHCLDMAQRNLYRDVMLENYRNLVFLGIVVSKPDLITHLEQGKK |
| | | PSTMQRHEMVANPSVLCSHF |
| 712 | ZFP1_HUMAN | NKSQGSVSFTDVTVDFTQEEWEQLDPSQRILYMDVMLENYSNLLSVEVWKADDQMERDHR |
| | | NPDEQARQFLILKNQTPIEE |
| 713 | ZN713_HUMAN | EEEEMNDGSQMVRSQESLTFQDVAVDFTREEWDQLYPAQKNLYRDVMLENYRNLVALGYQ |
| | | LCKPEVIAQLELEEEWVIER |
| 714 | ZN816_HUMAN | EEATKKSKEKEPGMALPQGRLTFRDVAIEFSLEEWKCLNPAQRALYRAVMLENYRNLEFV |
| | | DSSLKSMMEFSSTRHSITGE |
| 715 | ZN426_HUMAN | EKTPAGRIVADCLTDCYQDSVTFDDVAVDFTQEEWTLLDSTQRSLYSDVMLENYKNLATV |
| | | GGQIIKPSLISWLEQEESRT |
| 716 | ZN674_HUMAN | AMSQESLTFKDVFVDFTLEEWQQLDSAQKNLYRDVMLENYSHLVSVGHLVGKPDVIFRLG |
| | | PGDESWMADGGTPVRTCAGE |
| 717 | ZN627_HUMAN | DSVAFEDVAVNFTLEEWALLDPSQKNLYRDVMRETFRNLASVGKQWEDQNIEDPFKIPRR |
| | | NISHIPERLCESKEGGQGEE |
| 718 | ZNF20_HUMAN | MFQDSVAFEDVAVSFTQEEWALLDPSQKNLYRDVMQETFKNLTSVGKTWKVQNIEDEYKN |
| | | PRRNLSLMREKLCESKESHH |
| 719 | Z587B_HUMAN | AVVATLRLSAQGTVTFEDVAVKFTQEEWNLLSEAQRCLYRDVTLENLALMSSLGCWCGVE |
| | | DEAAPSKQSIYIQRETQVRT |
| 720 | ZN316_HUMAN | EEEEEDEDEDDLLTAGCQELVTFEDVAVYFSLEEWERLEADQRGLYQEVMQENYGILVSL |
| | | GYPIPKPDLIFRLEQGEEPW |
| 721 | ZN233_HUMAN | TKFQEMVTFKDVAVVFTREELGLLDLAQRKLYQDVMLENFRNLLSVGYQPFKLDVILQLG |
| | | KEDKLRMMETEIQGDGCSGH |
| 722 | ZN611_HUMAN | EEAAQKRKGKEPGMALPQGRLTFRDVAIEFSLAEWKCLNPSQRALYREVMLENYRNLEAV |
| | | DISSKCMMKEVLSTGQGNTE |
| 723 | ZN556_HUMAN | DTVVFEDVVVDFTLEEWALLNPAQRKLYRDVMLETFKHLASVDNEAQLKASGSISQQDTS |
| | | GEKLSLKQKIEKFTRKNIWA |
| 724 | ZN234_HUMAN | TTFKEGLTFKDVAVVFTEEELGLLDPVQRNLYQDVMLENFRNLLSVGHHPFKHDVFLLEK |
| | | EKKLDIMKTATQRKGKSADK |
| 725 | ZN560_HUMAN | SALQQEFWKIQTSNGIQMDLVTFDSVAVEFTQEEWTLLDPAQRNLYSDVMLENYKNLSSV |
| | | GYQLFKPSLISWLEEEEELS |
| 726 | ZNF77_HUMAN | DCVIFEEVAVNFTPEEWALLDHAQRSLYRDVMLETCRNLASLDCYIYVRTSGSSSQRDVF |
| | | GNGISNDEEIVKFTGSDSWS |
| 727 | ZN682_HUMAN | ELLTFRDVTIEFSLEEWEFLNPAQQSLYRKVMLENYRNLVSLGLTVSKPELISRLEQRQE |
| | | PWNVKRHETIAKPPAMSSHY |
| 728 | ZN614_HUMAN | IKTQESLTLEDVAVEFSWEEWQLLDTAQKNLYRDVMVENYNHLVSLGYQTSKPDVLSKLA |
| | | HGQEPWTTDAKIQNKNCPGI |
| 729 | ZN785_HUMAN | PAHVPGEAGPRRTRESRPGAVSFADVAVYFSPEEWECLRPAQRALYRDVMRETFGHLGAL |
| | | GFSVPKPAFISWVEGEVEAW |
| 730 | ZN445_HUMAN | GCPGDQVTPTRSLTAQLQETMTFKDVEVTFSQDEWGWLDSAQRNLYRDVMLENYRNMASL |
| | | VGPFTKPALISWLEAREPWG |
| 731 | ZFP30_HUMAN | ARDLVMFRDVAVDFSQEEWECLNSYQRNLYRDVILENYSNLVSLAGCSISKPDVITLLEQ |
| | | GKEPWMVVRDEKRRWTLDLE |
| 732 | ZN225_HUMAN | TTLKEAVTFKDVAVVFTEEELRLLDLAQRKLYREVMLENFRNLLSVGHQSLHRDTFHFLK |
| | | EEKFWMMETATQREGNLGGK |
| 733 | ZN551_HUMAN | SPPSPRSSMAAVALRDSAQGMTFEDVAIYFSQEEWELLDESQRFLYCDVMLENFAHVTSL |
| | | GYCHGMENEAIASEQSVSIQ |
| 734 | ZN610_HUMAN | DEEAQKRKAKESGMALPQGRLTFMDVAIEFSQEEWKSLDPGQRALYRDVMLENYRNLVFL |
| | | GICLPDLSIISMLKQRREPL |
| 735 | ZN528_HUMAN | ALTQGPLKFMDVAIEFSQEEWKCLDPAQRTLYRDVMLENYRNLVSLGICLPDLSVTSMLE |
| | | QKRDPWTLQSEEKIANDPDG |
| 736 | ZN284_HUMAN | TMFKEAVTFKDVAVVFTEEELGLLDVSQRKLYRDVMLENFRNLLSVGHQLSHRDTFHFQR |
| | | EEKFWIMETATQREGNSGGK |
| 737 | ZN418_HUMAN | QGTVAFEDVAVNFSQEEWSLLSEVQRCLYHDVMLENWVLISSLGCWCGSEDEEAPSKKSI |
| | | SIQRVSQVSTPGAGVSPKKA |
| 738 | MPP8_HUMAN | AEAFGDSEEDGEDVFEVEKILDMKTEGGKVLYKVRWKGYTSDDDTWEPEIHLEDCKEVLL |
| | | EFRKKIAENKAKAVRKDIQR |
| 739 | ZN490_HUMAN | VLQMQNSEHHGQSIKTQTDSISLEDVAVNFTLEEWALLDPGQRNIYRDVMRATFKNLACI |
| | | GEKWKDQDIEDEHKNQGRNL |
| 740 | ZN805_HUMAN | AMALTDPAQVSVTFDDVAVTFTQEEWGQLDLAQRTLYQEVMLENCGLLVSLGCPVPRPEL |
| | | TYHLEHGQEPWTRKEDLSQG |
| 741 | Z780B_HUMAN | VHGSVTFRDVAIDFSQEEWECLQPDQRTLYRDVMLENYSHLISLGSSISKPDVITLLEQE |
| | | KEPWIVVSKETSRWYPDLES |
| 742 | ZN763_HUMAN | DPVACEDVAVNFTQEEWALLDISQRKLYREVMLETFRNLTSIGKKWKDQNIEYEYQNPRR |
| | | NFRSLIEGNVNEIKEDSHCG |
| 743 | ZN285_HUMAN | IKFQERVTFKDVAVVFTKEELALLDKAQINLYQDVMLENFRNLMLVRDGIKNNILNLQAK |
| | | GLSYLSQEVLHCWQIWKQRI |
| 744 | ZNF85_HUMAN | GPLTFRDVAIEFSLKEWQCLDTAQRNLYRNVMLENYRNLVFLGITVSKPDLITCLEQGKE |
| | | AWSMKRHEIMVAKPTVMCSH |
| 745 | ZN223_HUMAN | TMSKEAVTFKDVAVVFTEEELGLLDLAQRKLYRDVMLENFRNLLSVGHQPFHRDTFHFLR |
| | | EEKFWMMDIATQREGNSGGK |
| 746 | ZNF90_HUMAN | GPLEFRDVAIEFSLEEWHCLDTAQQNLYRDVMLENYRHLVFLGIVVTKPDLITCLEQGKK |
| | | PFTVKRHEMIAKSPVMCFHF |
| 747 | ZN557_HUMAN | GHTEGGELVNELLKSWLKGLVTFEDVAVEFTQEEWALLDPAQRTLYRDVMLENCRNLASL |
| | | GNQVDKPRLISQLEQEDKVM |
| 748 | ZN425_HUMAN | AEPASVTVTFDDVALYFSEQEWEILEKWQKQMYKQEMKTNYETLDSLGYAFSKPDLITWM |
| | | EQGRMLLISEQGCLDKTRRT |
| 749 | ZN229_HUMAN | HSQASAISQDREEKIMSQEPLSFKDVAVVFTEEELELLDSTQRQLYQDVMQENFRNLLSV |
| | | GERNPLGDKNGKDTEYIQDE |
| 750 | ZN606_HUMAN | GSLEEGRRATGLPAAQVQEPVTFKDVAVDFTQEEWGQLDLVQRTLYRDVMLETYGHLLSV |
| | | GNQIAKPEVISLLEQGEEPW |
| 751 | ZN155_HUMAN | TTFKEAVTEKDVAVVFTEEELGLLDPAQRKLYRDVMLENFRNLLSVGHQPFHQDTCHFLR |
| | | EEKFWMMGTATQREGNSGGK |
| 752 | ZN222_HUMAN | AKLYEAVTFKDVAVIFTEEELGLLDPAQRKLYRDVMLENFRNLLSVGGKIQTEMETVPEA |
| | | GTHEEFSCKQIWEQIASDLT |
| 753 | ZN442_HUMAN | RSDLFLPDSQTNEERKQYDSVAFEDVAVNFTQEEWALLGPSQKSLYRDVMWETIRNLDCI |
| | | GMKWEDTNIEDQHRNPRRSL |
| 754 | ZNF91_HUMAN | PGTPGSLEMGLLTFRDVAIEFSPEEWQCLDTAQQNLYRNVMLENYRNLAFLGIALSKPDL |
| | | ITYLEQGKEPWNMKQHEMVD |
| 755 | ZN135_HUMAN | TPGVRVSTDPEQVTFEDVVVGFSQEEWGQLKPAQRTLYRDVMLDTFRLLVSVGHWLPKPN |
| | | VISLLEQEAELWAVESRLPQ |
| 756 | ZN778_HUMAN | EQTQAAGMVAGWLINCYQDAVTFDDVAVDFTQEEWTLLDPSQRDLYRDVMLENYENLASV |
| | | EWRLKTKGPALRQDRSWFRA |
| 757 | RYBP_HUMAN | PSEANSIQSANATTKTSETNHTSRPRLKNVDRSTAQQLAVTVGNVTVIITDFKEKTRSSS |
| | | TSSSTVTSSAGSEQQNQSSS |
| 758 | ZN534_HUMAN | ALTQGQLSFSDVAIEFSQEEWKCLDPGQKALYRDVMLENYRNLVSLGEDNVRPEACICSG |
| | | ICLPDLSVTSMLEQKRDPWT |
| 759 | ZN586_HUMAN | AAAAALRAPAQSSVTFEDVAVNFSLEEWSLLNEAQRCLYRDVMLETLTLISSLGCWHGGE |
| | | DEAAPSKQSTCIHIYKDQGG |
| 760 | ZN567_HUMAN | AQGSVSFNDVTVDFTQEEWQHLDHAQKTLYMDVMLENYCHLISVGCHMTKPDVILKLERG |
| | | EEPWTSFAGHTCLEENWKAE |
| 761 | ZN440_HUMAN | DPVAFKDVAVNFTQEEWALLDISQRKLYREVMLETFRNLTSLGKRWKDQNIEYEHQNPRR |
| | | NFRSLIEEKVNEIKDDSHCG |
| 762 | ZN583_HUMAN | SKDLVTFGDVAVNFSQEEWEWLNPAQRNLYRKVMLENYRSLVSLGVSVSKPDVISLLEQG |
| | | KEPWMVKKEGTRGPCPDWEY |
| 763 | ZN441_HUMAN | DSVAFEDVAINFTCEEWALLGPSQKSLYRDVMQETIRNLDCIGMIWQNHDIEEDQYKDLR |
| | | RNLRCHMVERACEIKDNSQC |
| 764 | ZNF43_HUMAN | GPLTFMDVAIEFCLEEWQCLDIAQQNLYRNVMLENYRNLVFLGIAVSKPDLITCLEQEKE |
| | | PWEPMRRHEMVAKPPVMCSH |
| 765 | CBX5_HUMAN | QSNDIARGFERGLEPEKIIGATDSCGDLMFLMKWKDTDEADLVLAKEANVKCPQIVIAFY |
| | | EERLTWHAYPEDAENKEKET |
| 766 | ZN589_HUMAN | ALPAKDSAWPWEEKPRYLGPVTFEDVAVLFTEAEWKRLSLEQRNLYKEVMLENLRNLVSL |
| | | AESKPEVHTCPSCPLAFGSQ |
| 767 | ZNF10_HUMAN | DAKSLTAWSRTLVTFKDVFVDFTREEWKLLDTAQQIVYRNVMLENYKNLVSLGYQLTKPD |
| | | VILRLEKGEEPWLVEREIHQ |
| 768 | ZN563_HUMAN | DAVAFEDVAVNFTQEEWALLGPSQKNLYRYVMQETIRNLDCIRMIWEEQNTEDQYKNPRR |
| | | NLRCHMVERFSESKDSSQCG |
| 769 | ZN561_HUMAN | EKTKVERMVEDYLASGYQDSVTFDDVAVDFTPEEWALLDTTEKYLYRDVMLENYMNLASV |
| | | EWEIQPRTKRSSLQQGFLKN |
| 770 | ZN136_HUMAN | DSVAFEDVDVNFTQEEWALLDPSQKNLYRDVMWETMRNLASIGKKWKDQNIKDHYKHRGR |
| | | NLRSHMLERLYQTKDGSQRG |
| 771 | ZN630_HUMAN | IESQEPVTFEDVAVDFTQEEWQQLNPAQKTLHRDVMLETYNHLVSVGCSGIKPDVIFKLE |
| | | HGKDPWIIESELSRWIYPDR |
| 772 | ZN527_HUMAN | AVGLCKAMSQGLVTFRDVALDESQEEWEWLKPSQKDLYRDVMLENYRNLVWLGLSISKPN |
| | | MISLLEQGKEPWMVERKMSQ |
| 773 | ZN333_HUMAN | DKVEEEAMAPGLPTACSQEPVTFADVAVVFTPEEWVFLDSTQRSLYRDVMLENYRNLASV |
| | | ADQLCKPNALSYLEERGEQW |
| 774 | Z324B_HUMAN | TFEDVAVYFSQEEWGLLDTAQRALYRHVMLENFTLVTSLGLSTSRPRVVIQLERGEEPWV |
| | | PSGKDMTLARNTYGRLNSGS |
| 775 | ZN786_HUMAN | AEPPRLPLTFEDVAIYFSEQEWQDLEAWQKELYKHVMRSNYETLVSLDDGLPKPELISWI |
| | | EHGGEPFRKWRESQKSGNII |
| 776 | ZN709_HUMAN | DSVVFEDVAVNFTQEEWALLGPSQKKLYRDVMQETFVNLASIGENWEEKNIEDHKNQGRK |
| | | LRSHMVERLCERKEGSQFGE |
| 777 | ZN792_HUMAN | AAAALRDPAQGCVTFEDVTIYFSQEEWVLLDEAQRLLYCDVMLENFALIASLGLISFRSH |
| | | IVSQLEMGKEPWVPDSVDMT |
| 778 | ZN599_HUMAN | AAPALALVSFEDVVVTFTGEEWGHLDLAQRTLYQEVMLETCRLLVSLGHPVPKPELIYLL |
| | | EHGQELWTVKRGLSQSTCAG |
| 779 | ZN613_HUMAN | IKSQESLTLEDVAVEFTWEEWQLLGPAQKDLYRDVMLENYSNLVSVGYQASKPDALFKLE |
| | | QGEPWTVENEIHSQICPEIK |
| 780 | ZF69B_HUMAN | GESLESRVTLGSLTAESQELLTFKDVSVDFTQEEWGQLAPAHRNLYREVMLENYGNLVSV |
| | | GCQLSKPGVISQLEKGEEPW |
| 781 | ZN799_HUMAN | ASVALEDVAVNFTREEWALLGPCQKNLYKDVMQETIRNLDCVGMKWKDQNIEDQYRYPRK |
| | | NLRCRMLERFVESKDGTQCG |
| 782 | ZN569_HUMAN | TESQGTVTFKDVAIDFTQEEWKRLDPAQRKLYRNVMLENYNNLITVGYPFTKPDVIFKLE |
| | | QEEEPWVMEEEVLRRHWQGE |
| 783 | ZN564_HUMAN | DSVASEDVAVNFTLEEWALLDPSQKKLYRDVMRETFRNLACVGKKWEDQSIEDWYKNQGR |
| | | ILRNHMEEGLSESKEYDQCG |
| 784 | ZN546_HUMAN | EETQGELTSSCGSKTMANVSLAFRDVSIDLSQEEWECLDAVQRDLYKDVMLENYSNLVSL |
| | | GYTIPKPDVITLLEQEKEPW |
| 785 | ZFP92_HUMAN | AAILLTTRPKVPVSFEDVSVYFTKTEWKLLDLRQKVLYKRVMLENYSHLVSLGFSFSKPH |
| | | LISQLERGEGPWVADIPRTW |
| 786 | YAF2_HUMAN | KDKVEKEKSEKETTSKKNSHKKTRPRLKNVDRSSAQHLEVTVGDLTVIITDFKEKTKSPP |
| | | ASSAASADQHSQSGSSSDNT |
| 787 | ZN723_HUMAN | GPLTFTDVAIKFSLEEWQFLDTAQQNLYRDVMLENYRNLVFLGVGVSKPDLITCLEQGKE |
| | | PWNMKRHKMVAKPPVVCSHF |
| 788 | ZNF34_HUMAN | RKPNPQAMAALFLSAPPQAEVTFEDVAVYLSREEWGRLGPAQRGLYRDVMLETYGNLVSL |
| | | GVGPAGPKPGVISQLERGDE |
| 789 | ZN439_HUMAN | LSLSPILLYTCEMFQDPVAFKDVAVNFTQEEWALLDISQKNLYREVMLETFWNLTSIGKK |
| | | WKDQNIEYEYQNPRRNFRSV |
| 790 | ZFP57_HUMAN | AAGEPRSLLFFQKPVTFEDVAVNFTQEEWDCLDASQRVLYQDVMSETFKNLTSVARIFLH |
| | | KPELITKLEQEEEQWRETRV |
| 791 | ZNF19_HUMAN | AAMPLKAQYQEMVTFEDVAVHFTKTEWTGLSPAQRALYRSVMLENFGNLTALGYPVPKPA |
| | | LISLLERGDMAWGLEAQDDP |
| 792 | ZN404_HUMAN | ARVPLTFSDVAIDFSQEEWEYLNSDQRDLYRDVMLENYTNLVSLDFNFTTESNKLSSEKR |
| | | NYEVNAYHQETWKRNKTFNL |
| 793 | ZN274_HUMAN | ASRLPTAWSCEPVTFEDVTLGFTPEEWGLLDLKQKSLYREVMLENYRNLVSVEHQLSKPD |
| | | VVSQLEEAEDFWPVERGIPQ |
| 794 | CBX3_HUMAN | SKKKRDAADKPRGFARGLDPERIIGATDSSGELMFLMKWKDSDEADLVLAKEANMKCPQI |
| | | VIAFYEERLTWHSCPEDEAQ |
| 795 | ZNF30_HUMAN | AHKYVGLQYHGSVTFEDVAIAFSQQEWESLDSSQRGLYRDVMLENYRNLVSMGHSRSKPH |
| | | VIALLEQWKEPEVTVRKDGR |
| 796 | ZN250_HUMAN | AAARLLPVPAGPQPLSFQAKLTFEDVAVLLSQDEWDRLCPAQRGLYRNVMMETYGNVVSL |
| | | GLPGSKPDIISQLERGEDPW |
| 797 | ZN570_HUMAN | AVGLLKAMYQELVTFRDVAVDFSQEEWDCLDSSQRHLYSNVMLENYRILVSLGLCFSKPS |
| | | VILLLEQGKAPWMVKRELTK |
| 798 | ZN675_HUMAN | GLLTFRDVAIEFSLEEWQCLDTAQRNLYKNVILENYRNLVFLGIAVSKQDLITCLEQEKE |
| | | PLTVKRHEMVNEPPVMCSHF |
| 799 | ZN695_HUMAN | GLLAFRDVALEFSPEEWECLDPAQRSLYRDVMLENYRNLISLGEDSFNMQFLFHSLAMSK |
| | | PELIICLEARKEPWNVNTEK |
| 800 | ZN548_HUMAN | NLTEGRVVFEDVAIYFSQEEWGHLDEAQRLLYRDVMLENLALLSSLGSWHGAEDEEAPSQ |
| | | QGFSVGVSEVTASKPCLSSQ |
| 801 | ZN132_HUMAN | GPAQHTSWPCGSAVPTLKSMVTFEDVAVYFSQEEWELLDAAQRHLYHSVMLENLELVTSL |
| | | GSWHGVEGEGAHPKQNVSVE |
| 802 | ZN738_HUMAN | SGYPGAERNLLEYSYFEKGPLTFRDVVIEFSQEEWQCLDTAQQDLYRKVMLENFRNLVFL |
| | | GIDVSKPDLITCLEQGKDPW |
| 803 | ZN420_HUMAN | ARKLVMFRDVAIDFSQEEWECLDSAQRDLYRDVMLENYSNLVSLDLPSRCASKDLSPEKN |
| | | TYETELSQWEMSDRLENCDL |
| 804 | ZN626_HUMAN | GPLQFRDVAIEFSLEEWHCLDTAQRNLYRNVMLENYSNLVFLGITVSKPDLITCLEQGRK |
| | | PLTMKRNEMIAKPSVMCSHF |
| 805 | ZN559_HUMAN | VAGWLTNYSQDSVTFEDVAVDETQEEWTLLDQTQRNLYRDVMLENYKNLVAVDWESHINT |
| | | KWSAPQQNFLQGKTSSVVEM |
| 806 | ZN460_HUMAN | AAAWMAPAQESVTFEDVAVTFTQEEWGQLDVTQRALYVEVMLETCGLLVALGDSTKPETV |
| | | EPIPSHLALPEEVSLQEQLA |
| 807 | ZN268_HUMAN | VLEWLFISQEQPKITKSWGPLSFMDVFVDFTWEEWQLLDPAQKCLYRSVMLENYSNLVSL |
| | | GYQHTKPDIIFKLEQGEELC |
| 808 | ZN304_HUMAN | AAAVLMDRVQSCVTFEDVEVYFSREEWELLEEAQRFLYRDVMLENFALVATLGFWCEAEH |
| | | EAPSEQSVSVEGVSQVRTAE |
| 809 | ZIM2_HUMAN | AGSQFPDFKHLGTFLVFEELVTFEDVLVDFSPEELSSLSAAQRNLYREVMLENYRNLVSL |
| | | GHQFSKPDIISRLEEEESYA |
| 810 | ZN605_HUMAN | IQSQISFEDVAVDFTLEEWQLLNPTQKNLYRDVMLENYSNLVFLEVWLDNPKMWLRDNQD |
| | | NLKSMERGHKYDVFGKIFNS |
| 811 | ZN844_HUMAN | DLVAFEDVAVNFTQEEWSLLDPSQKNLYREVMQETLRNLASIGEKWKDQNIEDQYKNPRN |
| | | NLRSLLGERVDENTEENHCG |
| 812 | SUMO5_HUMAN | KDEDIKLRVIGQDSSEIHFKVKMTTPLKKLKKSYCQRQGVPVNSLRFLFEGQRIADNHTP |
| | | EELGMEEEDVIEVYQEQIGG |
| 813 | ZN101_HUMAN | DSVAFEDVAVNFTQEEWALLSPSQKNLYRDVTLETFRNLASVGIQWKDQDIENLYQNLGI |
| | | KLRSLVERLCGRKEGNEHRE |
| 814 | ZN783_HUMAN | RNFWILRLPPGSKGEAPKVPVTFDDVAVYFSELEWGKLEDWQKELYKHVMRGNYETLVSL |
| | | DYAISKPDILTRIERGEEPC |
| 815 | ZN417_HUMAN | AAAAPRRPTQQGTVTFEDVAVNFSQEEWCLLSEAQRCLYRDVMLENLALISSLGCWCGSK |
| | | DEEAPCKQRISVQRESQSRT |
| 816 | ZN182_HUMAN | SGEDSGSFYSWQKAKREQGLVTFEDVAVDFTQEEWQYLNPPQRTLYRDVMLETYSNLVFV |
| | | GQQVTKPNLILKLEVEECPA |
| 817 | ZN823_HUMAN | DSVAFEDVAVNFTQEEWALLGPSQKSLYRNVMQETIRNLDCIEMKWEDQNIGDQCQNAKR |
| | | NLRSHTCEIKDDSQCGETFG |
| 818 | ZN177_HUMAN | AAGWLTTWSQNSVTFQEVAVDFSQEEWALLDPAQKNLYKDVMLENFRNLASVGYQLCRHS |
| | | LISKVDQEQLKTDERGILQG |
| 819 | ZN197_HUMAN | ENPRNQLMALMLLTAQPQELVMFEEVSVCFTSEEWACLGPIQRALYWDVMLENYGNVTSL |
| | | EWETMTENEEVTSKPSSSQR |
| 820 | ZN717_HUMAN | LETYNSLVSLQELVSFEEVAVHFTWEEWQDLDDAQRTLYRDVMLETYSSLVSLGHCITKP |
| | | EMIFKLEQGAEPWIVEETPN |
| 821 | ZN669_HUMAN | RHFRRPEPCREPLASPIQDSVAFEDVAVNFTQEEWALLDSSQKNLYREVMQETCRNLASV |
| | | GSQWKDQNIEDHFEKPGKDI |
| 822 | ZN256_HUMAN | AAAELTAPAQGIVTFEDVAVYFSWKEWGLLDEAQKCLYHDVMLENLTLTTSLGGSGAGDE |
| | | EAPYQQSTSPQRVSQVRIPK |
| 823 | ZN251_HUMAN | AATFQLPGHQEMPLTFQDVAVYFSQAEGRQLGPQQRALYRDVMLENYGNVASLGFPVPKP |
| | | ELISQLEQGKELWVLNLLGA |
| 824 | CBX4_HUMAN | RSEAGEPPSSLQVKPETPASAAVAVAAAAAPTTTAEKPPAEAQDEPAESLSEFKPFFGNI |
| | | IITDVTANCLTVTFKEYVTV |
| 825 | PCGF2_HUMAN | HRTTRIKITELNPHLMCALCGGYFIDATTIVECLHSFCKTCIVRYLETNKYCPMCDVQVH |
| | | KTRPLLSIRSDKTLQDIVYK |
| 826 | CDY2_HUMAN | ASQEFEVEAIVDKRQDKNGNTQYLVRWKGYDKQDDTWEPEQHLMNCEKCVHDFNRRQTEK |
| | | QKKLTWTTTSRIFSNNARRR |
| 827 | CDYL2_HUMAN | ASGDLYEVERIVDKRKNKKGKWEYLIRWKGYGSTEDTWEPEHHLLHCEEFIDEFNGLHMS |
| | | KDKRIKSGKQSSTSKLLRDS |
| 828 | HERC2_HUMAN | TLIRKADLENHNKDGGFWTVIDGKVYDIKDFQTQSLTGNSILAQFAGEDPVVALEAALQF |
| | | EDTRESMHAFCVGQYLEPDQ |
| 829 | ZN562_HUMAN | EKTKIGTMVEDHRSNSYQDSVTFDDVAVEFTPEEWALLDTTQKYLYRDVMLENYMNLASV |
| | | DFFFCLTSEWEIQPRTKRSS |
| 830 | ZN461_HUMAN | AHELVMFRDVAIDVSQEEWECLNPAQRNLYKEVMLENYSNLVSLGLSVSKPAVISSLEQG |
| | | KEPWMVVREETGRWCPGTWK |
| 831 | Z324A_HUMAN | AFEDVAVYFSQEEWGLLDTAQRALYRRVMLDNFALVASLGLSTSRPRVVIQLERGEEPWV |
| | | PSGTDTTLSRTTYRRRNPGS |
| 832 | ZN766_HUMAN | AQLRRGHLTFRDVAIEFSQEEWKCLDPVQKALYRDVMLENYRNLVSLGICLPDLSIISMM |
| | | KQRTEPWTVENEMKVAKNPD |
| 833 | ID2_HUMAN | SDHSLGISRSKTPVDDPMSLLYNMNDCYSKLKELVPSIPQNKKVSKMEILQHVIDYILDL |
| | | QIALDSHPTIVSLHHQRPGQ |
| 834 | TOX_HUMAN | KDPNEPQKPVSAYALFFRDTQAAIKGQNPNATFGEVSKIVASMWDGLGEEQKQVYKKKTE |
| | | AAKKEYLKQLAAYRASLVSK |
| 835 | ZN274_HUMAN | QEEKQEDAAICPVTVLPEEPVTFQDVAVDFSREEWGLLGPTQRTEYRDVMLETFGHLVSV |
| | | GWETTLENKELAPNSDIPEE |
| 836 | SCMH1_HUMAN | DASRLSGRDPSSWTVEDVMQFVREADPQLGPHADLFRKHEIDGKALLLLRSDMMMKYMGL |
| | | KLGPALKLSYHIDRLKQGKF |
| 837 | ZN214_HUMAN | AVTFEDVTIIFTWEEWKFLDSSQKRLYREVMWENYTNVMSVENWNESYKSQEEKFRYLEY |
| | | ENFSYWQGWWNAGAQMYENQ |
| 838 | CBX7_HUMAN | ELSAIGEQVFAVESIRKKRVRKGKVEYLVKWKGWPPKYSTWEPEEHILDPRLVMAYEEKE |
| | | ERDRASGYRKRGPKPKRLLL |
| 839 | ID1_HUMAN | GGAGARLPALLDEQQVNVLLYDMNGCYSRLKELVPTLPQNRKVSKVEILQHVIDYIRDLQ |
| | | LELNSESEVGTPGGRGLPVR |
| 840 | CREM_HUMAN | VVMAASPGSLHSPQQLAEEATRKRELRLMKNREAAKECRRRKKEYVKCLESRVAVLEVQN |
| | | KKLIEELETLKDICSPKTDY |
| 841 | SCX_HUMAN | GGGPGGRPGREPRQRHTANARERDRTNSVNTAFTALRTLIPTEPADRKLSKIETLRLASS |
| | | YISHLGNVLLAGEACGDGQP |
| 842 | ASCL1_HUMAN | SGFGYSLPQQQPAAVARRNERERNRVKLVNLGFATLREHVPNGAANKKMSKVETLRSAVE |
| | | YIRALQQLLDEHDAVSAAFQ |
| 843 | ZN764_HUMAN | APLPPRDPNGAGPEWREPGAVSFADVAVYFCREEWGCLRPAQRALYRDVMRETYGHLSAL |
| | | GIGGNKPALISWVEEEAELW |
| 844 | SCML2_HUMAN | KQGFSKDPSTWSVDEVIQFMKHTDPQISGPLADLFRQHEIDGKALFLLKSDVMMKYMGLK |
| | | LGPALKLCYYIEKLKEGKYS |
| 845 | TWST1_HUMAN | SGGGSPQSYEELQTQRVMANVRERQRTQSLNEAFAALRKIIPTLPSDKLSKIQTLKLAAR |
| | | YIDFLYQVLQSDELDSKMAS |
| 846 | CREB1_HUMAN | IAPGVVMASSPALPTQPAEEAARKREVRLMKNREAARECRRKKKEYVKCLFNRVAVLENQ |
| | | NKTLIEELKALKDLYCHKSD |
| 847 | TERF1_HUMAN | SRIPVSKSQPVTPEKHRARKRQAWLWEEDKNLRSGVRKYGEGNWSKILLHYKFNNRTSVM |
| | | LKDRWRTMKKLKLISSDSED |
| 848 | ID3_HUMAN | SLAIARGRGKGPAAEEPLSLLDDMNHCYSRLRELVPGVPRGTQLSQVEILQRVIDYILDL |
| | | QVVLAEPAPGPPDGPHLPIQ |
| 849 | CBX8_HUMAN | GSGPPSSGGGLYRDMGAQGGRPSLIARIPVARILGDPEEESWSPSLTNLEKVVVTDVTSN |
| | | FLTVTIKESNTDQGFFKEKR |
| 850 | CBX4_HUMAN | ELPAVGEHVFAVESIEKKRIRKGRVEYLVKWRGWSPKYNTWEPEENILDPRLLIAFQNRE |
| | | RQEQLMGYRKRGPKPKPLVV |
| 851 | GSX1_HUMAN | VDSSSNQLPSSKRMRTAFTSTQLLELEREFASNMYLSRLRRIEIATYLNLSEKQVKIWFQ |
| | | NRRVKHKKEGKGSNHRGGGG |
| 852 | NKX22_HUMAN | TPGGGGDAGKKRKRRVLFSKAQTYELERRFRQQRYLSAPEREHLASLIRLTPTQVKIWFQ |
| | | NHRYKMKRARAEKGMEVTPL |
| 853 | ATF1_HUMAN | QTVVMTSPVTLTSQTTKTDDPQLKREIRLMKNREAARECRRKKKEYVKCLFNRVAVLENQ |
| | | NKTLIEELKTLKDLYSNKSV |
| 854 | TWST2_HUMAN | KGSPSAQSFEELQSQRILANVRERQRTQSLNEAFAALRKIIPTLPSDKLSKIQTLKLAAR |
| | | YIDFLYQVLQSDEMDNKMTS |
| 855 | ZNF17_HUMAN | NLTEDYMVFEDVAIHFSQEEWGILNDVQRHLHSDVMLENFALLSSVGCWHGAKDEEAPSK |
| | | QCVSVGVSQVTTLKPALSTQ |
| 856 | TOX3_HUMAN | KDPNEPQKPVSAYALFFRDTQAAIKGQNPNATFGEVSKIVASMWDSLGEEQKQVYKRKTE |
| | | AAKKEYLKALAAYRASLVSK |
| 857 | TOX4_HUMAN | KDPNEPQKPVSAYALFFRDTQAAIKGQNPNATFGEVSKIVASMWDSLGEEQKQVYKRKTE |
| | | AAKKEYLKALAAYKDNQECQ |
| 858 | ZMYM3_HUMAN | LDGSTWDFCSEDCKSKYLLWYCKAARCHACKRQGKLLETIHWRGQIRHFCNQQCLLRFYS |
| | | QQNQPNLDTQSGPESLLNSQ |
| 859 | I2BP1_HUMAN | ASVQASRRQWCYLCDLPKMPWAMVWDFSEAVCRGCVNFEGADRIELLIDAARQLKRSHVL |
| | | PEGRSPGPPALKHPATKDLA |
| 860 | RHXF1_HUMAN | MEGPQPENMQPRTRRTKFTLLQVEELESVFRHTQYPDVPTRRELAENLGVTEDKVRVWFK |
| | | NKRARCRRHQRELMLANELR |
| 861 | SSX2_HUMAN | PKIMPKKPAEEGNDSEEVPEASGPQNDGKELCPPGKPTTSEKIHERSGPKRGEHAWTHRL |
| | | RERKQLVIYEEISDPEEDDE |
| 862 | I2BPL_HUMAN | SAAQVSSSRRQSCYLCDLPRMPWAMIWDFSEPVCRGCVNYEGADRIEFVIETARQLKRAH |
| | | GCFQDGRSPGPPPPVGVKTV |
| 863 | ZN680_HUMAN | PGPPGSLEMGPLTFRDVAIEFSLEEWQCLDTAQRNLYRKVMFENYRNLVFLGIAVSKPHL |
| | | ITCLEQGKEPWNRKRQEMVA |
| 864 | CBX1_HUMAN | NKKKVEEVLEEEEEEYVVEKVLDRRVVKGKVEYLLKWKGFSDEDNTWEPEENLDCPDLIA |
| | | EFLQSQKTAHETDKSEGGKR |
| 865 | TRI68_HUMAN | LANVVEKVRLLRLHPGMGLKGDLCERHGEKLKMFCKEDVLIMCEACSQSPEHEAHSVVPM |
| | | EDVAWEYKWELHEALEHLKK |
| 866 | HXA13_HUMAN | VVSHPSDASSYRRGRKKRVPYTKVQLKELEREYATNKFITKDKRRRISATTNLSERQVTI |
| | | WFQNRRVKEKKVINKLKTTS |
| 867 | PHC3_HUMAN | ENSDLLPVAQTEPSIWTVDDVWAFIHSLPGCQDIADEFRAQEIDGQALLLLKEDHLMSAM |
| | | NIKLGPALKICARINSLKES |
| 868 | TCF24_HUMAN | AGPGGGSRSGSGRPAAANAARERSRVQTLRHAFLELQRTLPSVPPDTKLSKLDVLLLATT |
| | | YIAHLTRSLQDDAEAPADAG |
| 869 | CBX3_HUMAN | QNGKSKKVEEAEPEEFVVEKVLDRRVVNGKVEYFLKWKGFTDADNTWEPEENLDCPELIE |
| | | AFLNSQKAGKEKDGTKRKSL |
| 870 | HXB13_HUMAN | QHPPDACAFRRGRKKRIPYSKGQLRELEREYAANKFITKDKRRKISAATSLSERQITIWF |
| | | QNRRVKEKKVLAKVKNSATP |
| 871 | HEY1_HUMAN | SMSPTTSSQILARKRRRGIIEKRRRDRINNSLSELRRLVPSAFEKQGSAKLEKAEILQMT |
| | | VDHLKMLHTAGGKGYFDAHA |
| 872 | PHC2_HUMAN | LVGMGHHFLPSEPTKWNVEDVYEFIRSLPGCQEIAEEFRAQEIDGQALLLLKEDHLMSAM |
| | | NIKLGPALKIYARISMLKDS |
| 873 | ZNF81_HUMAN | PANEDAPQPGEHGSACEVSVSFEDVTVDFSREEWQQLDSTQRRLYQDVMLENYSHLLSVG |
| | | FEVPKPEVIFKLEQGEGPWT |
| 874 | FIGLA_HUMAN | GYSSTENLQLVLERRRVANAKERERIKNLNRGFARLKALVPFLPQSRKPSKVDILKGATE |
| | | YIQVLSDLLEGAKDSKKQDP |
| 875 | SAM11_HUMAN | EEAPAPEDVTKWTVDDVCSFVGGLSGCGEYTRVFREQGIDGETLPLLTEEHLLTNMGLKL |
| | | GPALKIRAQVARRLGRVFYV |
| 876 | KMT2B_HUMAN | GGTLAHTPRRSLPSHHGKKMRMARCGHCRGCLRVQDCGSCVNCLDKPKFGGPNTKKQCCV |
| | | YRKCDKIEARKMERLAKKGR |
| 877 | HEY2_HUMAN | LNSPTTTSQIMARKKRRGIIEKRRRDRINNSLSELRRLVPTAFEKQGSAKLEKAEILQMT |
| | | VDHLKMLQATGGKGYFDAHA |
| 878 | JDP2_HUMAN | QPVKSELDEEEERRKRRREKNKVAAARCRNKKKERTEFLQRESERLELMNAELKTQIEEL |
| | | KQERQQLILMLNRHRPTCIV |
| 879 | HXC13_HUMAN | LQPEVSSYRRGRKKRVPYTKVQLKELEKEYAASKFITKEKRRRISATTNLSERQVTIWFQ |
| | | NRRVKEKKVVSKSKAPHLHS |
| 880 | ASCL4_HUMAN | LPVPLDSAFEPAFLRKRNERERQRVRCVNEGYARLRDHLPRELADKRLSKVETLRAAIDY |
| | | IKHLQELLERQAWGLEGAAG |
| 881 | HHEX_HUMAN | SPFLQRPLHKRKGGQVRFSNDQTIELEKKFETQKYLSPPERKRLAKMLQLSERQVKTWFQ |
| | | NRRAKWRRLKQENPQSNKKE |
| 882 | HERC2_HUMAN | IAIATGSLHCVCCTEDGEVYTWGDNDEGQLGDGTTNAIQRPRLVAALQGKKVNRVACGSA |
| | | HTLAWSTSKPASAGKLPAQV |
| 883 | GSX2_HUMAN | GGSDASQVPNGKRMRTAFTSTQLLELEREFSSNMYLSRLRRIEIATYLNLSEKQVKIWFQ |
| | | NRRVKHKKEGKGTQRNSHAG |
| 884 | BIN1_HUMAN | RLDLPPGFMFKVQAQHDYTATDTDELQLKAGDVVLVIPFQNPEEQDEGWLMGVKESDWNQ |
| | | HKELEKCRGVFPENFTERVP |
| 885 | ETV7_HUMAN | GICKLPGRLRIQPALWSREDVLHWLRWAEQEYSLPCTAEHGFEMNGRALCILTKDDFRHR |
| | | APSSGDVLYELLQYIKTQRR |
| 886 | ASCL3_HUMAN | PNYRGCEYSYGPAFTRKRNERERQRVKCVNEGYAQLRHHLPEEYLEKRLSKVETLRAAIK |
| | | YINYLQSLLYPDKAETKNNP |
| 887 | PHC1_HUMAN | LHGINPVFLSSNPSRWSVEEVYEFIASLQGCQEIAEEFRSQEIDGQALLLLKEEHLMSAM |
| | | NIKLGPALKICAKINVLKET |
| 888 | OTP_HUMAN | QAGQQQGQQKQKRHRTRFTPAQLNELERSFAKTHYPDIFMREELALRIGLTESRVQVWFQ |
| | | NRRAKWKKRKKTTNVFRAPG |
| 889 | I2BP2_HUMAN | AAAVAVAAASRRQSCYLCDLPRMPWAMIWDFTEPVCRGCVNYEGADRVEFVIETARQLKR |
| | | AHGCFPEGRSPPGAAASAAA |
| 890 | VGLL2_HUMAN | FSSQTPASIKEEEGSPEKERPPEAEYINSRCVLFTYFQGDISSVVDEHFSRALSQPSSYS |
| | | PSCTSSKAPRSSGPWRDCSF |
| 891 | HXA11_HUMAN | DKAGGSSGQRTRKKRCPYTKYQIRELEREFFFSVYINKEKRLQLSRMLNLTDRQVKIWFQ |
| | | NRRMKEKKINRDRLQYYSAN |
| 892 | PDLI4_HUMAN | GAPLSGLQGLPECTRCGHGIVGTIVKARDKLYHPECFMCSDCGLNLKQRGYFFLDERLYC |
| | | ESHAKARVKPPEGYDVVAVY |
| 893 | ASCL2_HUMAN | RRPATAETGGGAAAVARRNERERNRVKLVNLGFQALRQHVPHGGASKKLSKVETLRSAVE |
| | | YIRALQRLLAEHDAVRNALA |
| 894 | CDX4_HUMAN | TVQVTGKTRTKEKYRVVYTDHQRLELEKEFHCNRYITIQRKSELAVNLGLSERQVKIWFQ |
| | | NRRAKERKMIKKKISQFENS |
| 895 | ZN860_HUMAN | EEAAQKRKEKEPGMALPQGHLTFRDVAIEFSLEEWKCLDPTQRALYRAMMLENYRNLHSV |
| | | DISSKCMMKKFSSTAQGNTE |
| 896 | LMBL4_HUMAN | DIRASQVARWTVDEVAEFVQSLLGCEEHAKCFKKEQIDGKAFLLLTQTDIVKVMKIKLGP |
| | | ALKIYNSILMFRHSQELPEE |
| 897 | PDIP3_HUMAN | LSPLEGTKMTVNNLHPRVTEEDIVELFCVCGALKRARLVHPGVAEVVFVKKDDAITAYKK |
| | | YNNRCLDGQPMKCNLHMNGN |
| 898 | NKX25_HUMAN | DNAERPRARRRRKPRVLFSQAQVYELERRFKQQRYLSAPERDQLASVLKLTSTQVKIWFQ |
| | | NRRYKCKRQRQDQTLELVGL |
| 899 | CEBPB_HUMAN | SQVKSKAKKTVDKHSDEYKIRRERNNIAVRKSRDKAKMRNLETQHKVLELTAENERLQKK |
| | | VEQLSRELSTLRNLFKQLPE |
| 900 | ISL1_HUMAN | KRDYIRLYGIKCAKCSIGFSKNDFVMRARSKVYHIECFRCVACSRQLIPGDEFALREDGL |
| | | FCRADHDVVERASLGAGDPL |
| 901 | CDX2_HUMAN | SLGSQVKTRTKDKYRVVYTDHQRLELEKEFHYSRYITIRRKAELAATLGLSERQVKIWFQ |
| | | NRRAKERKINKKKLQQQQQQ |
| 902 | PROP1_HUMAN | QGGQRGRPHSRRRHRTTFSPVQLEQLESAFGRNQYPDIWARESLARDTGLSEARIQVWFQ |
| | | NRRAKQRKQERSLLQPLAHL |
| 903 | SIN3B_HUMAN | DALTYLDQVKIRFGSDPATYNGFLEIMKEFKSQSIDTPGVIRRVSQLFHEHPDLIVGFNA |
| | | FLPLGYRIDIPKNGKLNIQS |
| 904 | SMBT1_HUMAN | RLHLDSNPLKWSVADVVRFIRSTDCAPLARIFLDQEIDGQALLLLTLPTVQECMDLKLGP |
| | | AIKLCHHIERIKFAFYEQFA |
| 905 | HXC11_HUMAN | AKGAAPNAPRTRKKRCPYSKFQIRELEREFFFNVYINKEKRLQLSRMLNLTDRQVKIWFQ |
| | | NRRMKEKKLSRDRLQYFSGN |
| 906 | HXC10_HUMAN | TTGNWLTAKSGRKKRCPYTKHQTLELEKEFLFNMYLTRERRLEISKTINLTDRQVKIWFQ |
| | | NRRMKLKKMNRENRIRELTS |
| 907 | PRS6A_HUMAN | YLVSNVIELLDVDPNDQEEDGANIDLDSQRKGKCAVIKTSTRQTYFLPVIGLVDAEKLKP |
| | | GDLVGVNKDSYLILETLPTE |
| 908 | VSX1_HUMAN | KASPTLGKRKKRRHRTVFTAHQLEELEKAFSEAHYPDVYAREMLAVKTELPEDRIQVWFQ |
| | | NRRAKWRKREKRWGGSSVMA |
| 909 | NKX23_HUMAN | EESERPKPRSRRKPRVLFSQAQVFELERRFKQQRYLSAPEREHLASSLKLTSTQVKIWFQ |
| | | NRRYKCKRQRQDKSLELGAH |
| 910 | MTG16_HUMAN | VVPGSRQEEVIDHKLTEREWAEEWKHLNNLLNCIMDMVEKTRRSLTVLRRCQEADREELN |
| | | HWARRYSDAEDTKKGPAPAA |
| 911 | HMX3_HUMAN | ESPEKKPACRKKKTRTVFSRSQVFQLESTFDMKRYLSSSERAGLAASLHLTETQVKIWFQ |
| | | NRRNKWKRQLAAELEAANLS |
| 912 | HMX1_HUMAN | RGGVGVGGGRKKKTRTVFSRSQVFQLESTFDLKRYLSSAERAGLAASLQLTETQVKIWFQ |
| | | NRRNKWKRQLAAELEAASLS |
| 913 | KIF22_HUMAN | ELLAHGRQKILDLLNEGSARDLRSLQRIGPKKAQLIVGWRELHGPFSQVEDLERVEGITG |
| | | KQMESFLKANILGLAAGQRC |
| 914 | CSTF2_HUMAN | ESPYGETISPEDAPESISKAVASLPPEQMFELMKQMKLCVQNSPQEARNMLLQNPQLAYA |
| | | LLQAQVVMRIVDPEIALKIL |
| 915 | CEBPE_HUMAN | AGPLHKGKKAVNKDSLEYRLRRERNNIAVRKSRDKAKRRILETQQKVLEYMAENERLRSR |
| | | VEQLTQELDTLRNLFRQIPE |
| 916 | DLX2_HUMAN | IRIVNGKPKKVRKPRTIYSSFQLAALQRRFQKTQYLALPERAELAASLGLTQTQVKIWFQ |
| | | NRRSKFKKMWKSGEIPSEQH |
| 917 | ZMYM3_HUMAN | TVYQFCSPSCWTKFQRTSPEGGIHLSCHYCHSLFSGKPEVLDWQDQVFQFCCRDCCEDFK |
| | | RLRGVVSQCEHCRQEKLLHE |
| 918 | PPARG_HUMAN | TMVDTEMPFWPTNFGISSVDLSVMEDHSHSFDIKPFTTVDFSSISTPHYEDIPFTRTDPV |
| | | VADYKYDLKLQEYQSAIKVE |
| 919 | PRIC1_HUMAN | GRHHAELLKPRCSACDEIIFADECTEAEGRHWHMKHFCCLECETVLGGQRYIMKDGRPFC |
| | | CGCFESLYAEYCETCGEHIG |
| 920 | UNC4_HUMAN | DPDKESPGCKRRRTRTNFTGWQLEELEKAFNESHYPDVFMREALALRLDLVESRVQVWFQ |
| | | NRRAKWRKKENTKKGPGRPA |
| 921 | BARX2_HUMAN | TEQPTPRQKKPRRSRTIFTELQLMGLEKKFQKQKYLSTPDRLDLAQSLGLTQLQVKTWYQ |
| | | NRRMKWKKMVLKGGQEAPTK |
| 922 | ALX3_HUMAN | SMELAKNKSKKRRNRTTFSTFQLEELEKVFQKTHYPDVYAREQLALRTDLTEARVQVWFQ |
| | | NRRAKWRKRERYGKIQEGRN |
| 923 | TCF15_HUMAN | GGGGGAGPVVVVRQRQAANARERDRTQSVNTAFTALRTLIPTEPVDRKLSKIETVRLASS |
| | | YIAHLANVLLLGDSADDGQP |
| 924 | TERA_HUMAN | IDDTVEGITGNLFEVYLKPYFLEAYRPIRKGDIFLVRGGMRAVEFKVVETDPSPYCIVAP |
| | | DTVIHCEGEPIKREDEEESL |
| 925 | VSX2_HUMAN | SALNQTKKRKKRRHRTIFTSYQLEELEKAFNEAHYPDVYAREMLAMKTELPEDRIQVWFQ |
| | | NRRAKWRKREKCWGRSSVMA |
| 926 | HXD12_HUMAN | DGLPWGAAPGRARKKRKPYTKQQIAELENEFLVNEFINRQKRKELSNRLNLSDQQVKIWF |
| | | QNRRMKKKRVVLREQALALY |
| 927 | CDX1_HUMAN | GGGGSGKTRTKDKYRVVYTDHQRLELEKEFHYSRYITIRRKSELAANLGLTERQVKIWFQ |
| | | NRRAKERKVNKKKQQQQQPP |
| 928 | TCF23_HUMAN | TRAGGLALGRSEASPENAARERSRVRTLRQAFLALQAALPAVPPDTKLSKLDVLVLAASY |
| | | IAHLTRTLGHELPGPAWPPF |
| 929 | ALX1_HUMAN | KCDSNVSSSKKRRHRTTFTSLQLEELEKVFQKTHYPDVYVREQLALRTELTEARVQVWFQ |
| | | NRRAKWRKRERYGQIQQAKS |
| 930 | HXA10_HUMAN | NAANWLTAKSGRKKRCPYTKHQTLELEKEFLFNMYLTRERRLEISRSVHLTDRQVKIWFQ |
| | | NRRMKLKKMNRENRIRELTA |
| 931 | RX_HUMAN | LSEEEQPKKKHRRNRTTFTTYQLHELERAFEKSHYPDVYSREELAGKVNLPEVRVQVWFQ |
| | | NRRAKWRRQEKLEVSSMKLQ |
| 932 | CXXC5_HUMAN | HMAGLAEYPMQGELASAISSGKKKRKRCGMCAPCRRRINCEQCSSCRNRKTGHQICKFRK |
| | | CEELKKKPSAALEKVMLPTG |
| 933 | SCML1_HUMAN | SITKHPSTWSVEAVVLFLKQTDPLALCPLVDLFRSHEIDGKALLLLTSDVLLKHLGVKLG |
| | | TAVKLCYYIDRLKQGKCFEN |
| 934 | NFIL3_HUMAN | ACRRKREFIPDEKKDAMYWEKRRKNNEAAKRSREKRRLNDLVLENKLIALGEENATLKAE |
| | | LLSLKLKFGLISSTAYAQEI |
| 935 | DLX6_HUMAN | EIRFNGKGKKIRKPRTIYSSLQLQALNHRFQQTQYLALPERAELAASLGLTQTQVKIWFQ |
| | | NKRSKFKKLLKQGSNPHESD |
| 936 | MTG8_HUMAN | GLHGTRQEEMIDHRLTDREWAEEWKHLDHLLNCIMDMVEKTRRSLTVLRRCQEADREELN |
| | | YWIRRYSDAEDLKKGGGSSS |
| 937 | CBX8_HUMAN | ELSAVGERVFAAEALLKRRIRKGRMEYLVKWKGWSQKYSTWEPEENILDARLLAAFEERE |
| | | REMELYGPKKRGPKPKTFLL |
| 938 | CEBPD_HUMAN | AREKSAGKRGPDRGSPEYRQRRERNNIAVRKSRDKAKRRNQEMQQKLVELSAENEKLHQR |
| | | VEQLTRDLAGLRQFFKQLPS |
| 939 | SEC13_HUMAN | SGGCDNLIKLWKEEEDGQWKEEQKLEAHSDWVRDVAWAPSIGLPTSTIASCSQDGRVFIW |
| | | TCDDASSNTWSPKLLHKEND |
| 940 | FIP1_HUMAN | VKGVDLDAPGSINGVPLLEVDLDSFEDKPWRKPGADLSDYFNYGFNEDTWKAYCEKQKRI |
| | | RMGLEVIPVTSTINKITAED |
| 941 | ALX4_HUMAN | KADSESNKGKKRRNRTTFTSYQLEELEKVFQKTHYPDVYAREQLAMRTDLTEARVQVWFQ |
| | | NRRAKWRKRERFGQMQQVRT |
| 942 | LHX3_HUMAN | TAKQREAEATAKRPRTTITAKQLETLKSAYNTSPKPARHVREQLSSETGLDMRVVQVWFQ |
| | | NRRAKEKRLKKDAGRQRWGQ |
| 943 | PRIC2_HUMAN | GRHHAECLKPRCAACDEIIFADECTEAEGRHWHMKHFCCFECETVLGGQRYIMKEGRPYC |
| | | CHCFESLYAEYCDTCAQHIG |
| 944 | MAGI3_HUMAN | IIGGDRPDEFLQVKNVLKDGPAAQDGKIAPGDVIVDINGNCVLGHTHADVVQMFQLVPVN |
| | | QYVNLTLCRGYPLPDDSEDP |
| 945 | NELL1_HUMAN | CCPECDTRVTSQCLDQNGHKLYRSGDNWTHSCQQCRCLEGEVDCWPLTCPNLSCEYTAIL |
| | | EGECCPRCVSDPCLADNITY |
| 946 | PRRX1_HUMAN | LNSEEKKKRKQRRNRTTFNSSQLQALERVFERTHYPDAFVREDLARRVNLTEARVQVWFQ |
| | | NRRAKERRNERAMLANKNAS |
| 947 | MTG8R_HUMAN | GLNGGYQDELVDHRLTEREWADEWKHLDHALNCIMEMVEKTRRSMAVLRRCQESDREELN |
| | | YWKRRYNENTELRKTGTELV |
| 948 | RAX2_HUMAN | GPGEEAPKKKHRRNRTTFTTYQLHQLERAFEASHYPDVYSREELAAKVHLPEVRVQVWFQ |
| | | NRRAKWRRQERLESGSGAVA |
| 949 | DLX3_HUMAN | VRMVNGKPKKVRKPRTIYSSYQLAALQRRFQKAQYLALPERAELAAQLGLTQTQVKIWFQ |
| | | NRRSKFKKLYKNGEVPLEHS |
| 950 | DLX1_HUMAN | EVRFNGKGKKIRKPRTIYSSLQLQALNRRFQQTQYLALPERAELAASLGLTQTQVKIWFQ |
| | | NKRSKFKKLMKQGGAALEGS |
| 951 | NKX26_HUMAN | GRSEQPKARQRRKPRVLFSQAQVLALERRFKQQRYLSAPEREHLASALQLTSTQVKIWFQ |
| | | NRRYKCKRQRQDKSLELAGH |
| 952 | NAB1_HUMAN | LPRTLGELQLYRILQKANLLSYFDAFIQQGGDDVQQLCEAGEEEFLEIMALVGMASKPLH |
| | | VRRLQKALRDWVTNPGLFNQ |
| 953 | SAMD7_HUMAN | NLSLDEDIQKWTVDDVHSFIRSLPGCSDYAQVFKDHAIDGETLPLLTEEHLRGTMGLKLG |
| | | PALKIQSQVSQHVGSMFYKK |
| 954 | PITX3_HUMAN | SPEDGSLKKKQRRQRTHFTSQQLQELEATFQRNRYPDMSTREEIAVWTNLTEARVRVWFK |
| | | NRRAKWRKRERSQQAELCKG |
| 955 | WDR5_HUMAN | SNLLVSASDDKTLKIWDVSSGKCLKTLKGHSNYVFCCNFNPQSNLIVSGSFDESVRIWDV |
| | | KTGKCLKTLPAHSDPVSAVH |
| 956 | MEOX2_HUMAN | GNYKSEVNSKPRKERTAFTKEQIRELEAEFAHHNYLTRLRRYEIAVNLDLTERQVKVWFQ |
| | | NRRMKWKRVKGGQQGAAARE |
| 957 | NAB2_HUMAN | LPRTLGELQLYRVLQRANLLSYYETFIQQGGDDVQQLCEAGEEEFLEIMALVGMATKPLH |
| | | VRRLQKALREWATNPGLFSQ |
| 958 | DHX8_HUMAN | PEEPTIGDIYNGKVTSIMQFGCFVQLEGLRKRWEGLVHISELRREGRVANVADVVSKGQR |
| | | VKVKVLSFTGTKTSLSMKDV |
| 959 | FOXA2_HUMAN | YAFNHPFSINNLMSSEQQHHHSHHHHQPHKMDLKAYEQVMHYPGYGSPMPGSLAMGPVTN |
| | | KTGLDASPLAADTSYYQGVY |
| 960 | CBX6_HUMAN | TAAAGPAPPTAPEPAGASSEPEAGDWRPEMSPCSNVVVTDVTSNLLTVTIKEFCNPEDFE |
| | | KVAAGVAGAAGGGGSIGASK |
| 961 | EMX2_HUMAN | FLLHNALARKPKRIRTAFSPSQLLRLEHAFEKNHYVVGAERKQLAHSLSLTETQVKVWFQ |
| | | NRRTKFKRQKLEEEGSDSQQ |
| 962 | CPSF6_HUMAN | KRIALYIGNLTWWTTDEDLTEAVHSLGVNDILEIKFFENRANGQSKGFALVGVGSEASSK |
| | | KLMDLLPKRELHGQNPVVTP |
| 963 | HXC12_HUMAN | SGAPWYPINSRSRKKRKPYSKLQLAELEGEFLVNEFITRQRRRELSDRINLSDQQVKIWF |
| | | QNRRMKKKRLLLREQALSFF |
| 964 | KDM4B_HUMAN | SDNLYPESITSRDCVQLGPPSEGELVELRWTDGNLYKAKFISSVTSHIYQVEFEDGSQLT |
| | | VKRGDIFTLEEELPKRVRSR |
| 965 | LMBL3_HUMAN | GIPASKVSKWSTDEVSEFIQSLPGCEEHGKVFKDEQIDGEAFLLMTQTDIVKIMSIKLGP |
| | | ALKIFNSILMEKAAEKNSHN |
| 966 | PHX2A_HUMAN | EPSGLHEKRKQRRIRTTFTSAQLKELERVFAETHYPDIYTREELALKIDLTEARVQVWFQ |
| | | NRRAKFRKQERAASAKGAAG |
| 967 | EMX1_HUMAN | LLLHGPFARKPKRIRTAFSPSQLLRLERAFEKNHYVVGAERKQLAGSLSLSETQVKVWFQ |
| | | NRRTKYKRQKLEEEGPESEQ |
| 968 | NC2B_HUMAN | SSGNDDDLTIPRAAINKMIKETLPNVRVANDARELVVNCCTEFIHLISSEANEICNKSEK |
| | | KTISPEHVIQALESLGFGSY |
| 969 | DLX4_HUMAN | ERRPQAPAKKLRKPRTIYSSLQLQHLNQRFQHTQYLALPERAQLAAQLGLTQTQVKIWFQ |
| | | NKRSKYKKLLKQNSGGQEGD |
| 970 | SRY_HUMAN | NVQDRVKRPMNAFIVWSRDQRRKMALENPRMRNSEISKQLGYQWKMLTEAEKWPFFQEAQ |
| | | KLQAMHREKYPNYKYRPRRK |
| 971 | ZN777_HUMAN | EITRLAVWAAVQAVERKLEAQAMRLLTLEGRTGTNEKKIADCEKTAVEFANHLESKWVVL |
| | | GTLLQEYGLLQRRLENMENL |
| 972 | NELL1_HUMAN | CEKDIDECSEGIIECHNHSRCVNLPGWYHCECRSGFHDDGTYSLSGESCIDIDECALRTH |
| | | TCWNDSACINLAGGFDCLCP |
| 973 | ZN398_HUMAN | AAISLWTVVAAVQAIERKVEIHSRRLLHLEGRTGTAEKKLASCEKTVTELGNQLEGKWAV |
| | | LGTLLQEYGLLQRRLENLEN |
| 974 | GATA3_HUMAN | GQNRPLIKPKRRLSAARRAGTSCANCQTTTTTLWRRNANGDPVCNACGLYYKLHNINRPL |
| | | TMKKEGIQTRNRKMSSKSKK |
| 975 | BSH_HUMAN | HAELPGKHCRRRKARTVFSDSQLSGLEKRFEIQRYLSTPERVELATALSLSETQVKTWFQ |
| | | NRRMKHKKQLRKSQDEPKAP |
| 976 | SF3B4_HUMAN | QDATVYVGGLDEKVSEPLLWELFLQAGPVVNTHMPKDRVTGQHQGYGFVEFLSEEDADYA |
| | | IKIMNMIKLYGKPIRVNKAS |
| 977 | TEAD1_HUMAN | PIDNDAEGVWSPDIEQSFQEALAIYPPCGRRKIILSDEGKMYGRNELIARYIKLRTGKTR |
| | | TRKQVSSHIQVLARRKSRDF |
| 978 | TEAD3_HUMAN | GLDNDAEGVWSPDIEQSFQEALAIYPPCGRRKIILSDEGKMYGRNELIARYIKLRTGKTR |
| | | TRKQVSSHIQVLARKKVREY |
| 979 | RGAP1_HUMAN | DSVGTPQSNGGMRLHDFVSKTVIKPESCVPCGKRIKFGKLSLKCRDCRVVSHPECRDRCP |
| | | LPCIPTLIGTPVKIGEGMLA |
| 980 | PHF1_HUMAN | SAPHSMTASSSSVSSPSPGLPRRSAPPSPLCRSLSPGTGGGVRGGVGYLSRGDPVRVLAR |
| | | RVRPDGSVQYLVEWGGGGIF |
| 981 | FOXA1_HUMAN | GDPHYSFNHPFSINNLMSSSEQQHKLDFKAYEQALQYSPYGSTLPASLPLGSASVTTRSP |
| | | IEPSALEPAYYQGVYSRPVL |
| 982 | GATA2_HUMAN | GQNRPLIKPKRRLSAARRAGTCCANCQTTTTTLWRRNANGDPVCNACGLYYKLHNVNRPL |
| | | TMKKEGIQTRNRKMSNKSKK |
| 983 | FOXO3_HUMAN | DSLSGSSLYSTSANLPVMGHEKFPSDLDLDMFNGSLECDMESIIRSELMDADGLDFNFDS |
| | | LISTQNVVGLNVGNFTGAKQ |
| 984 | ZN212_HUMAN | TEISLWTVVAAIQAVEKKMESQAARLQSLEGRTGTAEKKLADCEKMAVEFGNQLEGKWAV |
| | | LGTLLQEYGLLQRRLENVEN |
| 985 | IRX4_HUMAN | MDSGTRRKNATRETTSTLKAWLQEHRKNPYPTKGEKIMLAIITKMTLTQVSTWFANARRR |
| | | LKKENKMTWPPRNKCADEKR |
| 986 | ZBED6_HUMAN | NIEKQIYLPSTRAKTSIVWHFFHVDPQYTWRAICNLCEKSVSRGKPGSHLGTSTLQRHLQ |
| | | ARHSPHWTRANKFGVASGEE |
| 987 | LHX4_HUMAN | AKQNDDSEAGAKRPRTTITAKQLETLKNAYKNSPKPARHVREQLSSETGLDMRVVQVWFQ |
| | | NRRAKEKRLKKDAGRHRWGQ |
| 988 | SIN3A_HUMAN | DALSYLDQVKLQFGSQPQVYNDFLDIMKEFKSQSIDTPGVISRVSQLFKGHPDLIMGFNT |
| | | FLPPGYKIEVQTNDMVNVTT |
| 989 | RBBP7_HUMAN | DDHTVCLWDINAGPKEGKIVDAKAIFTGHSAVVEDVAWHLLHESLFGSVADDQKLMIWDT |
| | | RSNTTSKPSHLVDAHTAEVN |
| 990 | NKX61_HUMAN | GSILLDKDGKRKHTRPTFSGQQIFALEKTFEQTKYLAGPERARLAYSLGMTESQVKVWFQ |
| | | NRRTKWRKKHAAEMATAKKK |
| 991 | TRI68_HUMAN | DPTALVEAIVEEVACPICMTFLREPMSIDCGHSFCHSCLSGLWEIPGESQNWGYTCPLCR |
| | | APVQPRNLRPNWQLANVVEK |
| 992 | R51A1_HUMAN | QSLPKKVSLSSDTTRKPLEIRSPSAESKKPKWVPPAASGGSRSSSSPLVVVSVKSPNQSL |
| | | RLGLSRLARVKPLHPNATST |
| 993 | MB3L1_HUMAN | AKSSQRKQRDCVNQCKSKPGLSTSIPLRMSSYTFKRPVTRITPHPGNEVRYHQWEESLEK |
| | | PQQVCWQRRLQGLQAYSSAG |
| 994 | DLX5_HUMAN | VRMVNGKPKKVRKPRTIYSSFQLAALQRRFQKTQYLALPERAELAASLGLTQTQVKIWFQ |
| | | NKRSKIKKIMKNGEMPPEHS |
| 995 | NOTC1_HUMAN | LQCNNHACGWDGGDCSLNFNDPWKNCTQSLQCWKYFSDGHCDSQCNSAGCLFDGFDCQRA |
| | | EGQCNPLYDQYCKDHFSDGH |
| 996 | TERF2_HUMAN | ETWVEEDELFQVQAAPDEDSTTNITKKQKWTVEESEWVKAGVQKYGEGNWAAISKNYPFV |
| | | NRTAVMIKDRWRTMKRLGMN |
| 997 | ZN282_HUMAN | AEISLWTVVAAIQAVERKVDAQASQLLNLEGRTGTAEKKLADCEKTAVEFGNHMESKWAV |
| | | LGTLLQEYGLLQRRLENLEN |
| 998 | RGS12_HUMAN | LEKRTLFRLDLVPINRSVGLKAKPTKPVTEVLRPVVARYGLDLSGLLVRLSGEKEPLDLG |
| | | APISSLDGQRVVLEEKDPSR |
| 999 | ZN840_HUMAN | PNCLSSSMQLPHGGGRHQELVRFRDVAVVFSPEEWDHLTPEQRNLYKDVMLDNCKYLASL |
| | | GNWTYKAHVMSSLKQGKEPW |
| 1000 | SPI2B_HUMAN | DDYKEGDLRIMPESSESPPTEREPGGVVDGLIGKHVEYTKEDGSKRIGMVIHQVEAKPSV |
| | | YFIKFDDDFHIYVYDLVKKS |
| 1001 | PAX7_HUMAN | SEPDLPLKRKQRRSRTTFTAEQLEELEKAFERTHYPDIYTREELAQRTKLTEARVQVWFS |
| | | NRRARWRKQAGANQLAAFNH |
| 1002 | NKX62_HUMAN | AGGVLDKDGKKKHSRPTFSGQQIFALEKTFEQTKYLAGPERARLAYSLGMTESQVKVWFQ |
| | | NRRTKWRKRHAVEMASAKKK |
| 1003 | ASXL2_HUMAN | DVMSFSVTVTTIPASQAMNPSSHGQTIPVQAFSEENSIEGTPSKCYCRLKAMIMCKGCGA |
| | | FCHDDCIGPSKLCVSCLVVR |
| 1004 | FOXO1_HUMAN | GGYSSVSSCNGYGRMGLLHQEKLPSDLDGMFIERLDCDMESIIRNDLMDGDTLDFNFDNV |
| | | LPNQSFPHSVKTTTHSWVSG |
| 1005 | GATA3_HUMAN | GGSPTGFGCKSRPKARSSTGRECVNCGATSTPLWRRDGTGHYLCNACGLYHKMNGQNRPL |
| | | IKPKRRLSAARRAGTSCANC |
| 1006 | GATA1_HUMAN | GQNRPLIRPKKRLIVSKRAGTQCTNCQTTTTTLWRRNASGDPVCNACGLYYKLHQVNRPL |
| | | TMRKDGIQTRNRKASGKGKK |
| 1007 | ZMYM5_HUMAN | PVALLRKQNFQPTAQQQLTKPAKITCANCKKPLQKGQTAYQRKGSAHLFCSTTCLSSFSH |
| | | KRTQNTRSIICKKDASTKKA |
| 1008 | ZN783_HUMAN | TEITLWTVVAAIQALEKKVDSCLTRLLTLEGRTGTAEKKLADCEKTAVEFGNQLEGKWAV |
| | | LGTLLQEYGLLQRRLENVEN |
| 1009 | SPI2B_HUMAN | KKQRGRPSSQPRRNIVGCRISHGWKEGDEPITQWKGTVLDQVPINPSLYLVKYDGIDCVY |
| | | GLELHRDERVLSLKILSDRV |
| 1010 | LRP1_HUMAN | WTCDLDDDCGDRSDESASCAYPTCFPLTQFTCNNGRCININWRCDNDNDCGDNSDEAGCS |
| | | HSCSSTQFKCNSGRCIPEHW |
| 1011 | MIXL1_HUMAN | PKGAAAPSASQRRKRTSFSAEQLQLLELVFRRTRYPDIHLRERLAALTLLPESRIQVWFQ |
| | | NRRAKSRRQSGKSFQPLARP |
| 1012 | SGT1_HUMAN | KIKYDWYQTESQVVITLMIKNVQKNDVNVEFSEKELSALVKLPSGEDYNLKLELLHPIIP |
| | | EQSTFKVLSTKIEIKLKKPE |
| 1013 | LMCD1_HUMAN | DPSKEVEYVCELCKGAAPPDSPVVYSDRAGYNKQWHPTCFVCAKCSEPLVDLIYFWKDGA |
| | | PWCGRHYCESLRPRCSGCDE |
| 1014 | CEBPA_HUMAN | GSGAGKAKKSVDKNSNEYRVRRERNNIAVRKSRDKAKQRNVETQQKVLELTSDNDRLRKR |
| | | VEQLSRELDTLRGIFRQLPE |
| 1015 | GATA2_HUMAN | GPASSFTPKQRSKARSCSEGRECVNCGATATPLWRRDGTGHYLCNACGLYHKMNGQNRPL |
| | | IKPKRRLSAARRAGTCCANC |
| 1016 | SOX14_HUMAN | KPSDHIKRPMNAFMVWSRGQRRKMAQENPKMHNSEISKRLGAEWKLLSEAEKRPYIDEAK |
| | | RLRAQHMKEHPDYKYRPRRK |
| 1017 | WTIP_HUMAN | LYSGFQQTADKCSVCGHLIMEMILQALGKSYHPGCFRCSVCNECLDGVPFTVDVENNIYC |
| | | VRDYHTVFAPKCASCARPIL |
| 1018 | PRP19_HUMAN | HPSQDLVFSASPDATIRIWSVPNASCVQVVRAHESAVTGLSLHATGDYLLSSSDDQYWAF |
| | | SDIQTGRVLTKVTDETSGCS |
| 1019 | CBX6_HUMAN | ELSAVGERVFAAESIIKRRIRKGRIEYLVKWKGWAIKYSTWEPEENILDSRLIAAFEQKE |
| | | RERELYGPKKRGPKPKTFLL |
| 1020 | NKX11_HUMAN | RTGSDSKSGKPRRARTAFTYEQLVALENKFKATRYLSVCERLNLALSLSLTETQVKIWFQ |
| | | NRRTKWKKQNPGADTSAPTG |
| 1021 | RBBP4_HUMAN | VWDLSKIGEEQSPEDAEDGPPELLFIHGGHTAKISDFSWNPNEPWVICSVSEDNIMQVWQ |
| | | MAENIYNDEDPEGSVDPEGQ |
| 1022 | DMRT2_HUMAN | ERCTPAGGGAEPRKLSRTPKCARCRNHGVVSCLKGHKRFCRWRDCQCANCLLVVERQRVM |
| | | AAQVALRRQQATEDKKGLSG |
| 1023 | SMCA2_HUMAN | SQPGALIPGDPQAMSQPNRGPSPFSPVQLHQLRAQILAYKMLARGQPLPETLQLAVQGKR |
| | | TLPGLQQQQ |
| 1024 | ZNF10 | MDAKSLTAWSRTLVTFKDVFVDFTREEWKLLDTAQQIVYRNVMLENYKNLVSLGYQLTKP |
| | | DVILRLEKGEEPWLVEREIHQETHPDSETAFEIKSSVSSRSIFKDKQSCDIKMEGMARND |
| | | LWYLSLEEVWKCRDQLDKYQENPERHLRQVAFTQKKVLTQERVSESGKYGGNCLLPAQLV |
| | | LREYFHKRDSHTKSLKHDLVLNGHQDSCASNSNECGQTFCQNIHLIQFARTHTGDKSYKC |
| | | PDNDNSLTHGSSLGISKGIHREKPYECKECGKFFSWRSNLTRHQLIHTGEKPYECKECGK |
| | | SFSRSSHLIGHQKTHTGEEPYECKECGKSFSWFSHLVTHQRTHTGDKLYTCNQCGKSFVH |
| | | SSRLIRHQRTHTGEKPYECPECGKSFRQSTHLILHQRTHVRVRPYECNECGKSYSQRSHL |
| | | VVHHRIHTGLKPFECKDCGKCFSRSSHLYSHQRTHTGEKPYECHDCGKSFSQSSALIVHQ |
| | | RIHTGEKPYECCQCGKAFIRKNDLIKHQRIHVGEETYKCNQCGIIFSQNSPFIVHQIAHT |
| | | GEQFLTCNQCGTALVNTSNLIGYQTNHIRENAY |
| 1025 | EED_HUMAN | MSEREVSTAPAGTDMPAAKKQKLSSDENSNPDLSGDENDDAVSIESGTNTERPDTPTNTP |
| | | NAPGRKSWGKGKWKSKKCKYSFKCVNSLKEDHNQPLFGVQFNWHSKEGDPLVFATVGSNR |
| | | VTLYECHSQGEIRLLQSYVDADADENFYTCAWTYDSNTSHPLLAVAGSRGIIRIINPITM |
| | | QCIKHYVGHGNAINELKFHPRDPNLLLSVSKDHALRLWNIQTDTLVAIFGGVEGHRDEVL |
| | | SADYDLLGEKIMSCGMDHSLKLWRINSKRMMNAIKESYDYNPNKTNRPFISQKIHFPDFS |
| | | TRDIHRNYVDCVRWLGDLILSKSCENAIVCWKPGKMEDDIDKIKPSESNVTILGRFDYSQ |
| | | CDIWYMRFSMDFWQKMLALGNQVGKLYVWDLEVEDPHKAKCTTLTHHKCGAAIRQTSFSR |
| | | DSSILIAVCDDASIWRWDRLR |
| 1026 | RCOR1_HUMAN | MPAMVEKGPEVSGKRRGRNNAAASASAAAASAAASAACASPAATAASGAAASSASAAAAS |
| | | AAAAPNNGQNKSLAAAAPNGNSSSNSWEEGSSGSSSDEEHGGGGMRVGPQYQAVVPDFDP |
| | | AKLARRSQERDNLGMLVWSPNQNLSEAKLDEYIAIAKEKHGYNMEQALGMLFWHKHNIEK |
| | | SLADLPNFTPFPDEWTVEDKVLFEQAFSFHGKTFHRIQQMLPDKSIASLVKFYYSWKKTR |
| | | TKTSVMDRHARKQKREREESEDELEEANGNNPIDIEVDQNKESKKEVPPTETVPQVKKEK |
| | | HSTQAKNRAKRKPPKGMFLSQEDVEAVSANATAATTVLRQLDMELVSVKRQIQNIKQTNS |
| | | ALKEKLDGGIEPYRLPEVIQKCNARWTTEEQLLAVQAIRKYGRDFQAISDVIGNKSVVQV |
| | | KNFFVNYRRRFNIDEVLQEWEAEHGKEETNGPSNQKPVKSPDNSIKMPEEEDEAPVLDVR |
| | | YASAS |
| 1027 | human DNMT1 | MPARTAPARVPTLAVPAISLPDDVRRRLKDLERDSLTEKECVKEKLNLLHEFLQTEIKNQ |
| | | LCDLETKLRKEELSEEGYLAKVKSLINKDLSLENGAHAYNREVNGRLENGNQARSEARRV |
| | | GMADANSPPKPLSKPRTPRRSKSDGEAKPEPSPSPRITRKSTRQTTITSHFAKGPAKRKP |
| | | QEESERAKSDESIKEEDKDQDEKRRRVTSRERVARPLPAEEPERAKSGTRTEKEEERDEK |
| | | EEKRLRSQTKEPTPKQKLKEEPDREARAGVQADEDEDGDEKDEKKHRSQPKDLAAKRRPE |
| | | EKEPEKVNPQISDEKDEDEKEEKRRKTTPKEPTEKKMARAKTVMNSKTHPPKCIQCGQYL |
| | | DDPLKYGQHPPDAVDEPQMLTNEKLSIFDANESGFESYEALPQHKLTCFSVYCKHGHLCP |
| | | IDTGLIEKNIELFFSGSAKPIYDDDPSLEGGVNGKNLGPINEWWITGFDGGEKALIGFST |
| | | SFAEYILMDPSPEYAPIFGLMQEKIYISKIVVEFLQSNSDSTYEDLINKIETTVPPSGLN |
| | | LNRFTEDSLLRHAQFVVEQVESYDEAGDSDEQPIFLTPCMRDLIKLAGVTLGQRRAQARR |
| | | QTIRHSTREKDRGPTKATTTKLVYQIFDTFFAEQIEKDDREDKENAFKRRRCGVCEVCQQ |
| | | PECGKCKACKDMVKFGGSGRSKQACQERRCPNMAMKEADDDEEVDDNIPEMPSPKKMHQG |
| | | KKKKQNKNRISWVGEAVKTDGKKSYYKKVCIDAETLEVGDCVSVIPDDSSKPLYLARVTA |
| | | LWEDSSNGQMFHAHWFCAGTDTVLGATSDPLELFLVDECEDMQLSYIHSKVKVIYKAPSE |
| | | NWAMEGGMDPESLLEGDDGKTYFYQLWYDQDYARFESPPKTQPTEDNKFKFCVSCARLAE |
| | | MRQKEIPRVLEQLEDLDSRVLYYSATKNGILYRVGDGVYLPPEAFTFNIKLSSPVKRPRK |
| | | EPVDEDLYPEHYRKYSDYIKGSNLDAPEPYRIGRIKEIFCPKKSNGRPNETDIKIRVNKF |
| | | YRPENTHKSTPASYHADINLLYWSDEEAVVDFKAVQGRCTVEYGEDLPECVQVYSMGGPN |
| | | RFYFLEAYNAKSKSFEDPPNHARSPGNKGKGKGKGKGKPKSQACEPSEPEIEIKLPKLRT |
| | | LDVFSGCGGLSEGFHQAGISDTLWAIEMWDPAAQAFRLNNPGSTVFTEDCNILLKLVMAG |
| | | ETTNSRGQRLPQKGDVEMLCGGPPCQGFSGMNRFNSRTYSKFKNSLVVSFLSYCDYYRPR |
| | | FFLLENVRNFVSFKRSMVLKLTLRCLVRMGYQCTFGVLQAGQYGVAQTRRRAIILAAAPG |
| | | EKLPLFPEPLHVFAPRACQLSVVVDDKKFVSNITRLSSGPFRTITVRDTMSDLPEVRNGA |
| | | SALEISYNGEPQSWFQRQLRGAQYQPILRDHICKDMSALVAARMRHIPLAPGSDWRDLPN |
| | | IEVRLSDGTMARKLRYTHHDRKNGRSSSGALRGVCSCVEAGKACDPAARQFNTLIPWCLP |
| | | HTGNRHNHWAGLYGRLEWDGFFSTTVTNPEPMGKQGRVLHPEQHRVVSVRECARSQGFPD |
| | | TYRLFGNILDKHRQVGNAVPPPLAKAIGLEIKLCMLAKARESASAKIKEEEAAKD |
| 1028 | human DNMT3A | MPAMPSSGPGDTSSSAAEREEDRKDGEEQEEPRGKEERQEPSTTARKVGRPGRKRKHPPV |
| | | ESGDTPKDPAVISKSPSMAQDSGASELLPNGDLEKRSEPQPEEGSPAGGQKGGAPAEGEG |
| | | AAETLPEASRAVENGCCTPKEGRGAPAEAGKEQKETNIESMKMEGSRGRLRGGLGWESSL |
| | | RQRPMPRLTFQAGDPYYISKRKRDEWLARWKREAEKKAKVIAGMNAVEENQGPGESQKVE |
| | | EASPPAVQQPTDPASPTVATTPEPVGSDAGDKNATKAGDDEPEYEDGRGFGIGELVWGKL |
| | | RGFSWWPGRIVSWWMTGRSRAAEGTRWVMWFGDGKFSVVCVEKLMPLSSFCSAFHQATYN |
| | | KQPMYRKAIYEVLQVASSRAGKLFPVCHDSDESDTAKAVEVQNKPMIEWALGGFQPSGPK |
| | | GLEPPEEEKNPYKEVYTDMWVEPEAAAYAPPPPAKKPRKSTAEKPKVKEIIDERTRERLV |
| | | YEVRQKCRNIEDICISCGSLNVTLEHPLFVGGMCQNCKNCFLECAYQYDDDGYQSYCTIC |
| | | CGGREVLMCGNNNCCRCFCVECVDLLVGPGAAQAAIKEDPWNCYMCGHKGTYGLLRRRED |
| | | WPSRLQMFFANNHDQEFDPPKVYPPVPAEKRKPIRVLSLFDGIATGLLVLKDLGIQVDRY |
| | | IASEVCEDSITVGMVRHQGKIMYVGDVRSVTQKHIQEWGPFDLVIGGSPCNDLSIVNPAR |
| | | KGLYEGTGRLFFEFYRLLHDARPKEGDDRPFFWLFENVVAMGVSDKRDISRFLESNPVMI |
| | | DAKEVSAAHRARYFWGNLPGMNRPLASTVNDKLELQECLEHGRIAKFSKVRTITTRSNSI |
| | | KQGKDQHFPVFMNEKEDILWCTEMERVFGFPVHYTDVSNMSRLARQRLLGRSWSVPVIRH |
| | | LFAPLKEYFACV |
| 1029 | human DNMT3A | NHDQEFDPPKVYPPVPAEKRKPIRVLSLFDGIATGLLVLKDLGIQVDRYIASEVCEDSIT |
| | catalytic | VGMVRHQGKIMYVGDVRSVTQKHIQEWGPFDLVIGGSPCNDLSIVNPARKGLYEGTGRLF |
| | domain | FEFYRLLHDARPKEGDDRPFFWLFENVVAMGVSDKRDISRFLESNPVMIDAKEVSAAHRA |
| | | RYFWGNLPGMNRPLASTVNDKLELQECLEHGRIAKFSKVRTITTRSNSIKQGKDQHFPVF |
| | | MNEKEDILWCTEMERVFGFPVHYTDVSNMSRLARQRLLGRSWSVPVIRHLFAPLKEYFAC |
| | | V |
| 1030 | human DNMT3B | MKGDTRHLNGEEDAGGREDSILVNGACSDQSSDSPPILEAIRTPEIRGRRSSSRLSKREV |
| | | SSLLSYTQDLTGDGDGEDGDGSDTPVMPKLFRETRTRSESPAVRTRNNNSVSSRERHRPS |
| | | PRSTRGRQGRNHVDESPVEFPATRSLRRRATASAGTPWPSPPSSYLTIDLTDDTEDTHGT |
| | | PQSSSTPYARLAQDSQQGGMESPQVEADSGDGDSSEYQDGKEFGIGDLVWGKIKGFSWWP |
| | | AMVVSWKATSKRQAMSGMRWVQWFGDGKFSEVSADKLVALGLFSQHFNLATFNKLVSYRK |
| | | AMYHALEKARVRAGKTFPSSPGDSLEDQLKPMLEWAHGGFKPTGIEGLKPNNTQPVVNKS |
| | | KVRRAGSRKLESRKYENKTRRRTADDSATSDYCPAPKRLKTNCYNNGKDRGDEDQSREQM |
| | | ASDVANNKSSLEDGCLSCGRKNPVSFHPLFEGGLCQTCRDRFLELFYMYDDDGYQSYCTV |
| | | CCEGRELLLCSNTSCCRCFCVECLEVLVGTGTAAEAKLQEPWSCYMCLPQRCHGVLRRRK |
| | | DWNVRLQAFFTSDTGLEYEAPKLYPAIPAARRRPIRVLSLFDGIATGYLVLKELGIKVGK |
| | | YVASEVCEESIAVGTVKHEGNIKYVNDVRNITKKNIEEWGPFDLVIGGSPCNDLSNVNPA |
| | | RKGLYEGTGRLFFEFYHLLNYSRPKEGDDRPFFWMFENVVAMKVGDKRDISRFLECNPVM |
| | | IDAIKVSAAHRARYFWGNLPGMNRPVIASKNDKLELQDCLEYNRIAKLKKVQTITTKSNS |
| | | IKQGKNQLFPVVMNGKEDVLWCTELERIFGFPVHYTDVSNMGRGARQKLLGRSWSVPVIR |
| | | HLFAPLKDYFACE |
| 1031 | mouse DNMT3C | MRGGSRHLSNEEDVSGCEDCIIISGTCSDQSSDPKTVPLTQVLEAVCTVENRGCRTSSQP |
| | | SKRKASSLISYVQDLTGDGDEDRDGEVGGSSGSGTPVMPQLFCETRIPSKTPAPLSWQAN |
| | | TSASTPWLSPASPYPIIDLTDEDVIPQSISTPSVDWSQDSHQEGMDTTQVDAESRDGGNI |
| | | EYQVSADKLLLSQSCILAAFYKLVPYRESIYRTLEKARVRAGKACPSSPGESLEDQLKPM |
| | | LEWAHGGFKPTGIEGLKPNKKQPENKSRRRTTNDPAASESSPPKRLKTNSYGGKDRGEDE |
| | | ESREQMASDVTNNKGNLEDHCLSCGRKDPVSFHPLFEGGLCQSCRDRFLELFYMYDEDGY |
| | | QSYCTVCCEGRELLLCSNTSCCRCFCVECLEVLVGAGTAEDVKLQEPWSCYMCLPQRCHG |
| | | VLRRRKDWNMRLQDFFTTDPDLEEFEPPKLYPAIPAAKRRPIRVLSLFDGIATGYLVLKE |
| | | LGIKVEKYIASEVCAESIAVGTVKHEGQIKYVDDIRNITKEHIDEWGPFDLVIGGSPCND |
| | | LSCVNPVRKGLFEGTGRLFFEFYRLLNYSCPEEEDDRPFFWMFENVVAMEVGDKRDISRF |
| | | LECNPVMIDAIKVSAAHRARYFWGNLPGMNRPVMASKNDKLELQDCLEFSRTAKLKKVQT |
| | | ITTKSNSIRQGKNQLFPVVMNGKDDVLWCTELERIFGFPEHYTDVSNMGRGARQKLLGRS |
| | | WSVPVIRHLFAPLKDHFACE |
| 1032 | human DNMT3L | MAAIPALDPEAEPSMDVILVGSSELSSSVSPGTGRDLIAYEVKANQRNIEDICICCGSLQ |
| | | VHTQHPLFEGGICAPCKDKFLDALFLYDDDGYQSYCSICCSGETLLICGNPDCTRCYCFE |
| | | CVDSLVGPGTSGKVHAMSNWVCYLCLPSSRSGLLQRRRKWRSQLKAFYDRESENPLEMFE |
| | | TVPVWRRQPVRVLSLFEDIKKELTSLGFLESGSDPGQLKHVVDVTDTVRKDVEEWGPFDL |
| | | VYGATPPLGHTCDRPPSWYLFQFHRLLQYARPKPGSPRPFFWMFVDNLVLNKEDLDVASR |
| | | FLEMEPVTIPDVHGGSLQNAVRVWSNIPAIRSSRHWALVSEEELSLLAQNKQSSKLAAKW |
| | | PTKLVKNCFLPLREYFKYFSTELTSSL |
| 1033 | human DNMT3L | NPLEMFETVPVWRRQPVRVLSLFEDIKKELTSLGFLESGSDPGQLKHVVDVTDTVRKDVE |
| | catalytic | EWGPFDLVYGATPPLGHTCDRPPSWYLFQFHRLLQYARPKPGSPRPFFWMFVDNLVLNKE |
| | domain | DLDVASRFLEMEPVTIPDVHGGSLQNAVRVWSNIPAIRSRHWALVSEEELSLLAQNKQSS |
| | | KLAAKWPTKLVKNCFLPLREYFKYFSTELTSSL |
| 1034 | mouse DNMT3L | MGSRETPSSCSKTLETLDLETSDSSSPDADSPLEEQWLKSSPALKEDSVDVVLEDCKEPL |
| | | SPSSPPTGREMIRYEVKVNRRSIEDICLCCGTLQVYTRHPLFEGGLCAPCKDKFLESLFL |
| | | YDDDGHQSYCTICCSGGTLFICESPDCTRCYCFECVDILVGPGTSERINAMACWVCFLCL |
| | | PFSRSGLLQRRKRWRHQLKAFHDQEGAGPMEIYKTVSAWKRQPVRVLSLFRNIDKVLKSL |
| | | GFLESGSGSGGGTLKYVEDVTNVVRRDVEKWGPFDLVYGSTQPLGSSCDRCPGWYMFQFH |
| | | RILQYALPRQESQRPFFWIFMDNLLLTEDDQETTTRFLQTEAVTLQDVRGRDYQNAMRVW |
| | | SNIPGLKSKHAPLTPKEEEYLQAQVRSRSKLDAPKVDLLVKNCLLPLREYFKYFSQNSLP |
| | | L |
| 1035 | mouse DNMT3L | GPMEIYKTVSAWKRQPVRVLSLFRNIDKVLKSLGFLESGSGSGGGTLKYVEDVTNVVRRD |
| | catalytic | VEKWGPFDLVYGSTQPLGSSCDRCPGWYMFQFHRILQYALPRQESQRPFFWIFMDNLLLT |
| | domain | EDDQETTTRFLQTEAVTLQDVRGRDYQNAMRVWSNIPGLKSKHAPLTPKEEEYLQAQVRS |
| | | RSKLDAPKVDLLVKNCLLPLREYFKYFSQNSLPL |
| 1036 | human TRDMT1 | MEPLRVLELYSGVGGMHHALRESCIPAQVVAAIDVNTVANEVYKYNFPHTQLLAKTIEGI |
| | (DNMT2) | TLEEFDRLSFDMILMSPPCQPFTRIGRQGDMTDSRTNSFLHILDILPRLQKLPKYILLEN |
| | | VKGFEVSSTRDLLIQTIENCGFQYQEFLLSPTSLGIPNSRLRYFLIAKLQSEPLPFQAPG |
| | | QVLMEFPKIESVHPQKYAMDVENKIQEKNVEPNISFDGSIQCSGKDAILFKLETAEEIHR |
| | | KNQQDSDLSVKMLKDFLEDDTDVNQYLLPPKSLLRYALLLDIVQPTCRRSVCFTKGYGSY |
| | | IEGTGSVLQTAEDVQVENIYKSLTNLSQEEQITKLLILKLRYFTPKEIANLLGFPPEFGF |
| | | PEKITVKQRYRLLGNSLNVHVVAKLIKILYE |
| 1037 | M. penetrans M | MNSNKDKIKVIKVFEAFAGIGSQFKALKNIARSKNWEIQHSGMVEWFVDAIVSYVAIHSK |
| | Mpe I | NFNPKIEQLDKDILSISNDSKMPISEYGIKKINNTIKASYLNYAKKHFNNLFDIKKVNKD |
| | | NFPKNIDIFTYSFPCQDLSVQGLQKGIDKELNTRSGLLWEIERILEEIKNSFSKEEMPKY |
| | | LLMENVKNLLSHKNKKNYNTWLKQLEKFGYKSKTYLLNSKNFDNCQNRERVFCLSIRDDY |
| | | LEKTGFKFKELEKVKNPPKKIKDILVDSSNYKYLNLNKYETTTFRETKSNIISRSLKNYT |
| | | TFNSENYVYNINGIGPTLTASGANSRIKIETQQGVRYLTPLECFKYMQFDVNDFKKVQST |
| | | NLISENKMIYIAGNSIPVKILEAIFNTLEFVNNEE |
| 1038 | S. monobiae M | MSKVENKTKKLRVFEAFAGIGAQRKALEKVRKDEYEIVGLAEWYVPAIVMYQAIHNNFHT |
| | SssI | KLEYKSVSREEMIDYLENKTLSWNSKNPVSNGYWKRKKDDELKIIYNAIKLSEKEGNIFD |
| | | IRDLYKRTLKNIDLLTYSFPCQDLSQQGIQKGMKRGSGTRSGLLWEIERALDSTEKNDLP |
| | | KYLLMENVGALLHKKNEEELNQWKQKLESLGYQNSIEVLNAADFGSSQARRRVFMISTLN |
| | | EFVELPKGDKKPKSIKKVLNKIVSEKDILNNLLKYNLTEFKKTKSNINKASLIGYSKFNS |
| | | EGYVYDPEFTGPTLTASGANSRIKIKDGSNIRKMNSDETFLYIGFDSQDGKRVNEIEFLT |
| | | ENQKIFVCGNSISVEVLEAIIDKIGG |
| 1039 | H. | MKDVLDDNLLEEPAAQYSLFEPESNPNLREKFTFIDLFAGIGGFRIAMQNLGGKCIFSSE |
| | parainfluenzae | WDEQAQKTYEANFGDLPYGDITLEETKAFIPEKFDILCAGFPCQAFSIAGKRGGFEDTRG |
| | M HpaII | TLFFDVAEIIRRHQPKAFFLENVKGLKNHDKGRTLKTILNVLREDLGYFVPEPAIVNAKN |
| | | FGVPQNRERIYIVGFHKSTGVNSFSYPEPLDKIVTFADIREEKTVPTKYYLSTQYIDTLR |
| | | KHKERHESKGNGFGYEIIPDDGIANAIVVGGMGRERNLVIDHRITDFTPTTNIKGEVNRE |
| | | GIRKMTPREWARLQGFPDSYVIPVSDASAYKQFGNSVAVPAIQATGKKILEKLGNLYD |
| 1040 | A. luteus M | MSKANAKYSFVDLFAGIGGFHAALAATGGVCEYAVEIDREAAAVYERNWNKPALGDITDD |
| | AluI | ANDEGVTLRGYDGPIDVLTGGFPCQPFSKSGAQHGMAETRGTLFWNIARIIEEREPTVLI |
| | | LENVRNLVGPRHRHEWLTIIETLRFFGYEVSGAPAIFSPHLLPAWMGGTPQVRERVFITA |
| | | TLVPERMRDERIPRTETGEIDAEAIGPKPVATMNDRFPIKKGGTELFHPGDRKSGWNLLT |
| | | SGIIREGDPEPSNVDLRLTETETLWIDAWDDLESTIRRATGRPLEGFPYWADSWTDFREL |
| | | SRLVVIRGFQAPEREVVGDRKRYVARTDMPEGFVPASVTRPAIDETLPAWKQSHLRRNYD |
| | | FFERHFAEVVAWAYRWGVYTDLFPASRRKLEWQAQDAPRLWDTVMHFRPSGIRAKRPTYL |
| | | PALVAITQTSIVGPLERRLSPRETARLQGLPEWFDFGEQRAAATYKQMGNGVNVGVVRHI |
| | | LREHVRRDRALLKLTPAGQRIINAVLADEPDATVGALGAAE |
| 1041 | H. aegyptius M | MNLISLFSGAGGLDLGFQKAGFRIICANEYDKSIWKTYESNHSAKLIKGDISKISSDEFP |
| | HaeIII | KCDGIIGGPPCQSWSEGGSLRGIDDPRGKLFYEYIRILKQKKPIFFLAENVKGMMAQRHN |
| | | KAVQEFIQEFDNAGYDVHIILLNANDYGVAQDRKRVFYIGFRKELNINYLPPIPHLIKPT |
| | | FKDVIWDLKDNPIPALDKNKTNGNKCIYPNHEYFIGSYSTIFMSRNRVRQWNEPAFTVQA |
| | | SGRQCQLHPQAPVMLKVSKNLNKFVEGKEHLYRRLTVRECARVQGFPDDFIFHYESLNDG |
| | | YKMIGNAVPVNLAYEIAKTIKSALEICKGN |
| 1042 | H. haemolyticus | MIEIKDKQLTGLRFIDLFAGLGGFRLALESCGAECVYSNEWDKYAQEVYEMNFGEKPEGD |
| | M HhaI | ITQVNEKTIPDHDILCAGFPCQAFSISGKQKGFEDSRGTLFFDIARIVREKKPKVVFMEN |
| | | VKNFASHDNGNTLEVVKNTMNELDYSFHAKVLNALDYGIPQKRERIYMICFRNDLNIQNF |
| | | QFPKPFELNTFVKDLLLPDSEVEHLVIDRKDLVMTNQEIEQTTPKTVRLGIVGKGGQGER |
| | | IYSTRGIAITLSAYGGGIFAKTGGYLVNGKTRKLHPRECARVMGYPDSYKVHPSTSQAYK |
| | | QFGNSVVINVLQYIAYNIGSSLNFKPY |
| 1043 | Moraxella M | MKPEILKLIRSKLDLTQKQASEIIEVSDKTWQQWESGKTEMHPAYYSFLQEKLKDKINFE |
| | MspI | ELSAQKTLQKKIFDKYNQNQITKNAEELAEITHIEERKDAYSSDFKFIDLFSGIGGIRQS |
| | | FEVNGGKCVFSSEIDPFAKFTYYTNFGVVPFGDITKVEATTIPQHDILCAGFPCQPFSHI |
| | | GKREGFEHPTQGTMFHEIVRIIETKKTPVLFLENVPGLINHDDGNTLKVIIETLEDMGYK |
| | | VHHTVLDASHFGIPQKRKRFYLVAFLNQNIHFEFPKPPMISKDIGEVLESDVTGYSISEH |
| | | LQKSYLFKKDDGKPSLIDKNTTGAVKTLVSTYHKIQRLTGTFVKDGETGIRLLTTNECKA |
| | | IMGFPKDFVIPVSRTQMYRQMGNSVVVPVVTKIAEQISLALKTVNQQSPQENFELELV |
| 1044 | Ascobolus Masc1 | MSERRYEAGMTVALHEGSFLKIQRVYIRQYHADNRREHMLVGPLFRRTKYLKALSKKVNE |
| | | VAIVHESIHVPVQDVIGVRELIITNRPFPECRKGDEHTGRLVCRWVYNLDERAKGREYKK |
| | | QRYIRRITEAEADPEYRVEDRVLRRRWFQEGYIGDEISYKEHGNGDIVDIRSESPLQVLD |
| | | GWGGDLVDLENGEETSIPGPCRSASSYGRLMKPPLAQAADSNTSRKYTFGDTFCGGGGVS |
| | | LGARQAGLEVKWAFDMNPNAGANYRRNFPNTDFFLAEAEQFIQLSVGISQHVDILHLSPP |
| | | CQTFSRAHTIAGKNDENNEASFFAVVNLIKAVRPRLFTVEETDGIMDRQSRQFIDTALMG |
| | | ITELGYSFRICVLNAIEYGVCQNRKRLIIIGAAPGEELPPFPLPTHQDFFSKDPRRDLLP |
| | | AVTLDDALSTITPESTDHHLNHVWQPAEWKTPYDAHRPFKNAIRAGGGEYDIYPDGRRKF |
| | | TVRELACIQGFPDEYEFVGTLTDKRRIIGNAVPPPLSAAIMSTLRQWMTEKDFERME |
| 1045 | Arabidopsis | MVENGAKAAKRKKRPLPEIQEVEDVPRTRRPRRAAACTSFKEKSIRVCEKSATIEVKKQQ |
| | MEET1 | IVEEEFLALRLTALETDVEDRPTRRLNDFVLFDSDGVPQPLEMLEIHDIFVSGAILPSDV |
| | | CTDKEKEKGVRCTSFGRVEHWSISGYEDGSPVIWISTELADYDCRKPAASYRKVYDYFYE |
| | | KARASVAVYKKLSKSSGGDPDIGLEELLAAVVRSMSSGSKYFSSGAAIIDFVISQGDFIY |
| | | NQLAGLDETAKKHESSYVEIPVLVALREKSSKIDKPLQRERNPSNGVRIKEVSQVAESEA |
| | | LTSDQLVDGTDDDRRYAILLQDEeNRKSMQQPRKNSSSGSASNMFYIKINEDEIANDYPL |
| | | PSYYKTSEEETDELILYDASYEVQSEHLPHRMLHNWALYNSDLRFISLELLPMKQCDDID |
| | | VNIFGSGVVTDDNGSWISLNDPDSGSQSHDPDGMCIFLSQIKEWMIEFGSDDIISISIRT |
| | | DVAWYRLGKPSKLYAPWWKPVLKTARVGISILTFLRVESRVARLSFADVTKRLSGLQAND |
| | | KAYISSDPLAVERYLVVHGQIILQLFAVYPDDNVKRCPFVVGLASKLEDRHHTKWIIKKK |
| | | KISLKELNLNPRAGMAPVASKRKAMQATTTRLVNRIWGEFYSNYSPEDPLQATAAENGED |
| | | EVEEEGGNGEEEVEEEGENGLTEDTVPEPVEVQKPHTPKKIRGSSGKREIKWDGESLGKT |
| | | SAGEPLYQQALVGGEMVAVGGAVTLEVDDPDEMPAIYFVEYMFESTDHCKMLHGRFLQRG |
| | | SMTVLGNAANERELFLTNECMTTQLKDIKGVASFEIRSRPWGHQYRKKNITADKLDWARA |
| | | LERKVKDLPTEYYCKSLYSPERGGFFSLPLSDIGRSSGFCTSCKIREDEEKRSTIKLNVS |
| | | KTGFFINGIEYSVEDFVYVNPDSIGGLKEGSKTSFKSGRNIGLRAYVVCQLLEIVPKESR |
| | | KADLGSFDVKVRRFYRPEDVSAEKAYASDIQELYFSQDTVVLPPGALEGKCEVRKKSDMP |
| | | LSREYPISDHIFFCDLFFDTSKGSLKQLPANMKPKFSTIKDDTLLRKKKGKGVESEIESE |
| | | IVKPVEPPKEIRLATLDIFAGCGGLSHGLKKAGVSDAKWAIEYEEPAGQAFKQNHPESTV |
| | | FVDNCNVILRAIMEKGGDQDDCVSTTEANELAAKLTEEQKSTLPLPGQVDFINGGPPCQG |
| | | FSGMNRFNQSSWSKVQCEMILAFLSFADYFRPRYFLLENVRTFVSFNKGQTFQLTLASLL |
| | | EMGYQVRFGILEAGAYGVSQSRKRAFIWAAAPEEVLPEWPEPMHVFGVPKLKISLSQGLH |
| | | YAAVRSTALGAPFRPITVRDTIGDLPSVENGDSRTNKEYKEVAVSWFQKEIRGNTIALTD |
| | | HICKAMNELNLIRCKLIPTRPGADWHDLPKRKVTLSDGRVEEMIPFCLPNTAERHNGWKG |
| | | LYGRLDWQGNFPTSVTDPQPMGKVGMCFHPEQHRILTVRECARSQGFPDSYEFAGNINHK |
| | | HRQIGNAVPPPLAFALGRKLKEALHLKKSPQHQP |
| 1046 | Ascobolus Masc2 | MELTPELSGVSTDLGGGGSIFAHWRMKEESPAPTEILDDLNVLEWEKTTRDYSKEDLRIA |
| | | DQLFSIEDEHQSLPFETADAEDGTPTEEEEEKELPMRTLDNFVLYDASDLELAALDLIGT |
| | | ELNIHAVGTVGPIYTEGEEDEQEDEDEDVSPPVRTGTQATSASVTQMTVELYIRNIVQYE |
| | | FCFNDDGTVETWIQTTNAHYKLLQPAKCYTSLYRPVNDCLNVITAIITLAPESTTMSLKD |
| | | LLKVMDDKAQAVSYEEVERMSEFIVQHLDQWMETAPKKKSKLIEKSKVYIDLNNLAGIDM |
| | | VSGVRPPPVRRVTGRSSAPKKRIVRNMNDAVLLHQNETTVTNWIHQLSAGMFGRALNVLG |
| | | AETADVENLTCDPASAKFVVPQRRLHKRLKWETRGHIPVSEEEYKHIYQGKKYAKFFEAV |
| | | RAVDESKLTIKLGDLVYVLDQDPKVTQTQFATAGREGRKKGAEKEKIQVRFGRVLSIRQP |
| | | DSNSKDAQNVFIHVQWLVLGCDTILQEMASRRELFLTDSCDTVFADVIYGVAKLTPLGAK |
| | | DIPTVEFHESMATMMGENEFFVRFKYNYQDGSFTDLKDVDAEQIGTLQPRVNTHRNPGYC |
| | | SNCRIKYDNERTGDKWIYENDTEGEPRLFRSSKGWCIYAQEFVYLQPVEKQPGTTFRVGY |
| | | ISEINKSSVIVELLARVDDDDKSGHISYSDPRHLYFTGTDIKVTFDKIIRKCFVFHDSGD |
| | | QKAKAPLMYGTLQRDLYYYRYEKRKGKAELVPVREIRSIHEQTLNDWESRTQIERHGAVS |
| | | GKKLKGLDIFAGCGGLTLGLDLSGAVDTKWDIEFAPSAANTLALNFPDAQVFNQCANVLL |
| | | SRAIQSEDEGSLDIEYDLQGRVLPDLPKKGEVDFIYGGPPCQGFSGVNRYKKGNDIKNSL |
| | | VATFLSYVDHYKPRFVLLENVKGLITTKLGNSKNAEGKWEGGISNGVVKFIYRTLISMNY |
| | | QCRIGLVQSGEYGVPQSRPRVIFLAARMGERLPDLPEPMHAFEVLDSQYALPHIKRYHTT |
| | | QNGVAPLPRITIGEAVSDLPKFQYANPGVWPRHDPYSSAKAQPSDKTIEKFSVSKATSFV |
| | | GYLLQPYHSRPQSEFQRRLRTKLVPSDEPAEKTSLLTTKLVTAHVTRLFNKETTQRIVCV |
| | | PMWPGADHRSLPKEMRPWCLVDPNSQAEKHRFWPGLFGRLGMEDFFSTALTDVQPCGKQG |
| | | KVLHPTQRRVYTVRELARAQGFPDWFAFTDGDADSGLGGVKKWHRNIGNAVPVPLGEQIG |
| | | RCIGYSVWWKDDMIAQLREDGADEDEEMIDGNDQWVEELNTQMAADMPGLPLLVTHLLNL |
| | | CVYRRLYGPNAKEFLPARVYDKKLEGGRRRLVWAML |
| 1047 | Neurospora Dim2 | MDSPDRSHGGMFIDVPAETMGFQEDYLDMFASVLSQGLAKEGDYAHHQPLPAGKEECLEP |
| | | IAVATTITPSPDDPQLQLQLELEQQFQTESGLNGVDPAPAPESEDEADLPDGFSDESPDD |
| | | DFVVQRSKHITVDLPVSTLINPRSTFQRIDENDNLVPPPQSTPERVAVEDLLKAAKAAGK |
| | | NKEDYIEFELHDFNFYVNYAYHPQEMRPIQLVATKVLHDKYYFDGVLKYGNTKHYVTGMQ |
| | | VLELPVGNYGASLHSVKGQIWVRSKHNAKKEIYYLLKKPAFEYQRYYQPFLWIADLGKHV |
| | | VDYCTRMVERKREVTLGCFKSDFIQWASKAHGKSKAFQNWRAQHPSDDFRTSVAANIGYI |
| | | WKEINGVAGAKRAAGDQLFRELMIVKPGQYFRQEVPPGPVVTEGDRTVAATIVTPYIKEC |
| | | FGHMILGKVLRLAGEDAEKEKEVKLAKRLKIENKNATKADTKDDMKNDTATESLPTPLRS |
| | | LPVQVLEATPIESDIVSIVSSDLPPSENNPPPLINGSVKPKAKANPKPKPSTQPLHAAHV |
| | | KYLSQELVNKIKVGDVISTPRDDSSNTDTKWKPTDTDDHRWFGLVQRVHTAKTKSSGRGL |
| | | NSKSFDVIWFYRPEDTPCCAMKYKWRNELFLSNHCTCQEGHHARVKGNEVLAVHPVDWFG |
| | | TPESNKGEFFVRQLYESEQRRWITLQKDHLTCYHNQPPKPPTAPYKPGDTVLATLSPSDK |
| | | FSDPYEVVEYFTQGEKETAFVRLRKLLRRRKVDRQDAPANELVYTEDLVDVRAERIVGKC |
| | | IMRCFRPDERVPSPYDRGGTGNMFFITHRQDHGRCVPLDTLPPTLRQGFNPLGNLGKPKL |
| | | RGMDLYCGGGNFGRGLEEGGVVEMRWANDIWDKAIHTYMANTPDPNKTNPFLGSVDDLLR |
| | | LALEGKFSDNVPRPGEVDFIAAGSPCPGFSLLTQDKKVLNQVKNQSLVASFASFVDFYRP |
| | | KYGVLENVSGIVQTFVNRKQDVLSQLFCALVGMGYQAQLILGDAWAHGAPQSRERVFLYF |
| | | AAPGLPLPDPPLPSHSHYRVKNRNIGFLCNGESYVQRSFIPTAFKFVSAGEGTADLPKIG |
| | | DGKPDACVRFPDHRLASGITPYIRAQYACIPTHPYGMNFIKAWNNGNGVMSKSDRDLFPS |
| | | EGKTRTSDASVGWKRLNPKTLFPTVTTTSNPSDARMGPGLHWDEDRPYTVQEMRRAQGYL |
| | | DEEVLVGRTTDQWKLVGNSVSRHMALAIGLKFREAWLGTLYDESAVVATATATATTAAAV |
| | | GVTVPVMEEPGIGTTESSRPSRSPVHTAVDLDDSKSERSRSTTPATVLSTSSAAGDGSAN |
| | | AAGLFDDDNDDMEMMEVTRKRSSPAVDEEGMRPSKVQKVEVTVASPASRRSSRQASRNPT |
| | | ASPSSKASKATTHEAPAPEELESDAESYSETYDKEGFDGDYHSGHEDQYSEEDEEEEYAE |
| | | PETMTVNGMTIVKL |
| 1048 | Drosophila | MVFRVLELFSGIGGMHYAFNYAQLDGQIVAALDVNTVANAVYAHNYGSNLVKTRNIQSLS |
| | dDnmt2 | VKEVTKLQANMLLMSPPCQPHTRQGLQRDTEDKRSDALTHLCGLIPECQELEYILMENVK |
| | | GFESSQARNQFIESLERSGFHWREFILTPTQFNVPNTRYRYYCIARKGADFPFAGGKIWE |
| | | EMPGAIAQNQGLSQIAEIVEENVSPDFLVPDDVLTKRVLVMDIIHPAQSRSMCFTKGYTH |
| | | YTEGTGSAYTPLSEDESHRIFELVKEIDTSNQDASKSEKILQQRLDLLHQVRLRYFTPRE |
| | | VARLMSFPENFEFPPETTNRQKYRLLGNSINVKVVGELIKLLTIK |
| 1049 | S. pombe Pmt1 | MLSTKRLRVLELYSGIGGMHYALNLANIPADIVCAIDINPQANEIYNLNHGKLAKHMDIS |
| | | TLTAKDFDAFDCKLWTMSPSCQPFTRIGNRKDILDPRSQAFLNILNVLPHVNNLPEYILI |
| | | ENVQGFEESKAAEECRKVLRNCGYNLIEGILSPNQFNIPNSRSRWYGLARLNFKGEWSID |
| | | DVFQFSEVAQKEGEVKRIRDYLEIERDWSSYMVLESVLNKWGHQFDIVKPDSSSCCCFTR |
| | | GYTHLVQGAGSILQMSDHENTHEQFERNRMALQLRYFTAREVARLMGFPESLEWSKSNVT |
| | | EKCMYRLLGNSINVKVVSYLISLLLEPLNF |
| 1050 | Arabidopsis | MVMSHIFLISQIQEVEHGDSDDVNWNTDDDELAIDNFQFSPSPVHISATSPNSIQNRISD |
| | DRM1 | ETVASFVEMGFSTQMIARAIEETAGANMEPMMILETLFNYSASTEASSSKSKVINHFIAM |
| | | GFPEEHVIKAMQEHGDEDVGEITNALLTYAEVDKLRESEDMNININDDDDDNLYSLSSDD |
| | | EEDELNNSSNEDRILQALIKMGYLREDAAIAIERCGEDASMEEVVDFICAAQMARQFDEI |
| | | YAEPDKKELMNNNKKRRTYTETPRKPNTDQLISLPKEMIGFGVPNHPGLMMHRPVPIPDI |
| | | ARGPPFFYYENVAMTPKGVWAKISSHLYDIVPEFVDSKHFCAAARKRGYIHNLPIQNRFQ |
| | | IQPPQHNTIQEAFPLTKRWWPSWDGRTKLNCLLTCIASSRLTEKIREALERYDGETPLDV |
| | | QKWVMYECKKWNLVWVGKNKLAPLDADEMEKLLGFPRDHTRGGGISTTDRYKSLGNSFQV |
| | | DTVAYHLSVLKPLFPNGINVLSLFTGIGGGEVALHRLQIKMNVVVSVEISDANRNILRSF |
| | | WEQTNQKGILREFKDVQKLDDNTIERLMDEYGGFDLVIGGSPCNNLAGGNRHHRVGLGGE |
| | | HSSLFFDYCRILEAVRRKARHMRR |
| 1051 | Arabadopsis | MVIWNNDDDDFLEIDNFQSSPRSSPIHAMQCRVENLAGVAVTTSSLSSPTETTDLVQMGF |
| | DRM2 | SDEVFATLFDMGFPVEMISRAIKETGPNVETSVIIDTISKYSSDCEAGSSKSKAIDHFLA |
| | | MGFDEEKVVKAIQEHGEDNMEAIANALLSCPEAKKLPAAVEEEDGIDWSSSDDDTNYTDM |
| | | LNSDDEKDPNSNENGSKIRSLVKMGFSELEASLAVERCGENVDIAELTDFLCAAQMAREF |
| | | SEFYTEHEEQKPRHNIKKRRFESKGEPRSSVDDEPIRLPNPMIGFGVPNEPGLITHRSLP |
| | | ELARGPPFFYYENVALTPKGVWETISRHLFEIPPEFVDSKYFCVAARKRGYIHNLPINNR |
| | | FQIQPPPKYTIHDAFPLSKRWWPEWDKRTKLNCILTCTGSAQLTNRIRVALEPYNEEPEP |
| | | PKHVQRYVIDQCKKWNLVWVGKNKAAPLEPDEMESILGFPKNHTRGGGMSRTERFKSLGN |
| | | SFQVDTVAYHLSVLKPIFPHGINVLSLFTGIGGGEVALHRLQIKMKLVVSVEISKVNRNI |
| | | LKDFWEQTNQTGELIEFSDIQHLTNDTIEGLMEKYGGFDLVIGGSPCNNLAGGNRVSRVG |
| | | LEGDQSSLFFEYCRILEVVRARMRGS |
| 1052 | Arabadopsis | MAARNKQKKRAEPESDLCFAGKPMSVVESTIRWPHRYQSKKTKLQAPTKKPANKGGKKED |
| | CMT1 | EEIIKQAKCHFDKALVDGVLINLNDDVYVTGLPGKLKFIAKVIELFEADDGVPYCRFRWY |
| | | YRPEDTLIERFSHLVQPKRVFLSNDENDNPLTCIWSKVNIAKVPLPKITSRIEQRVIPPC |
| | | DYYYDMKYEVPYLNFTSADDGSDASSSLSSDSALNCFENLHKDEKFLLDLYSGCGAMSTG |
| | | FCMGASISGVKLITKWSVDINKFACDSLKINHPETEVRNEAAEDFLALLKEWKRLCEKFS |
| | | LVSSTEPVESISELEDEEVEENDDIDEASTGAELEPGEFEVEKFLGIMFGDPQGTGEKTL |
| | | QLMVRWKGYNSSYDTWEPYSGLGNCKEKLKEYVIDGFKSHLLPLPGTVYTVCGGPPCQGI |
| | | SGYNRYRNNEAPLEDQKNQQLLVFLDIIDFLKPNYVLMENVVDLLRFSKGFLARHAVASF |
| | | VAMNYQTRLGMMAAGSYGLPQLRNRVFLWAAQPSEKLPPYPLPTHEVAKKFNTPKEFKDL |
| | | QVGRIQMEFLKLDNALTLADAISDLPPVTNYVANDVMDYNDAAPKTEFENFISLKRSETL |
| | | LPAFGGDPTRRLFDHQPLVLGDDDLERVSYIPKQKGANYRDMPGVLVHNNKAEINPRFRA |
| | | KLKSGKNVVPAYAISFIKGKSKKPFGRLWGDEIVNTVVTRAEPHNQCVIHPMQNRVLSVR |
| | | ENARLQGFPDCYKLCGTIKEKYIQVGNAVAVPVGVALGYAFGMASQGLTDDEPVIKLPFK |
| | | YPECMQAKDQI |
| 1053 | Arabadopsis | MLSPAKCESEEAQAPLDLHSSSRSEPECLSLVLWCPNPEEAAPSSTRELIKLPDNGEMSL |
| | CMT2 | RRSTTLNCNSPEENGGEGRVSQRKSSRGKSQPLLMLTNGCQLRRSPRFRALHANFDNVCS |
| | | VPVTKGGVSQRKFSRGKSQPLLTLTNGCQLRRSPRFRAVDGNFDSVCSVPVTGKFGSRKR |
| | | KSNSALDKKESSDSEGLTFKDIAVIAKSLEMEIISECQYKNNVAEGRSRLQDPAKRKVDS |
| | | DTLLYSSINSSKQSLGSNKRMRRSQRFMKGTENEGEENLGKSKGKGMSLASCSFRRSTRL |
| | | SGTVETGNTETLNRRKDCGPALCGAEQVRGTERLVQISKKDHCCEAMKKCEGDGLVSSKQ |
| | | ELLVFPSGCIKKTVNGCRDRTLGKPRSSGLNTDDIHTSSLKISKNDTSNGLIMTTALVEQ |
| | | DAMESLLQGKTSACGAADKGKTREMHVNSTVIYLSDSDEPSSIEYLNGDNLTQVESGSAL |
| | | SSGGNEGIVSLDLNNPTKSTKRKGKRVTRTAVQEQNKRSICFFIGEPLSCEEAQERWRWR |
| | | YELKERKSKSRGQQSEDDEDKIVANVECHYSQAKVDGHTFSLGDFAYIKGEEEETHVGQI |
| | | VEFFKTTDGESYFRVQWFYRATDTIMERQATNHDKRRLFYSTVMNDNPVDCLISKVTVLQ |
| | | VSPRVGLKPNSIKSDYYFDMEYCVEYSTFQTLRNPKTSENKLECCADVVPTESTESILKK |
| | | KSFSGELPVLDLYSGCGGMSTGLSLGAKISGVDVVTKWAVDQNTAACKSLKLNHPNTQVR |
| | | NDAAGDFLQLLKEWDKLCKRYVFNNDQRTDTLRSVNSTKETSGSSSSSDDDSDSEEYEVE |
| | | KLVDICFGDHDKTGKNGLKFKVHWKGYRSDEDTWELAEELSNCQDAIREFVTSGFKSKIL |
| | | PLPGRVGVICGGPPCQGISGYNRHRNVDSPLNDERNQQIIVFMDIVEYLKPSYVLMENVV |
| | | DILRMDKGSLGRYALSRLVNMRYQARLGIMTAGCYGLSQFRSRVFMWGAVPNKNLPPFPL |
| | | PTHDVIVRYGLPLEFERNVVAYAEGQPRKLEKALVLKDAISDLPHVSNDEDREKLPYESL |
| | | PKTDFQRYIRSTKRDLTGSAIDNCNKRTMLLHDHRPFHINEDDYARVCQIPKRKGANFRD |
| | | LPGLIVRNNTVCRDPSMEPVILPSGKPLVPGYVFTFQQGKSKRPFARLWWDETVPTVLTV |
| | | PTCHSQALLHPEQDRVLTIRESARLQGFPDYFQFCGTIKERYCQIGNAVAVSVSRALGYS |
| | | LGMAFRGLARDEHLIKLPQNFSHSTYPQLQETIPH |
| 1054 | Arabadopsis | MAPKRKRPATKDDTTKSIPKPKKRAPKRAKTVKEEPVTVVEEGEKHVARFLDEPIPESEA |
| | CMT3 | KSTWPDRYKPIEVQPPKASSRKKTKDDEKVEIIRARCHYRRAIVDERQIYELNDDAYVQS |
| | | GEGKDPFICKIIEMFEGANGKLYFTARWFYRPSDTVMKEFEILIKKKRVFFSEIQDTNEL |
| | | GLLEKKLNILMIPLNENTKETIPATENCDFFCDMNYFLPYDTFEAIQQETMMAISESSTI |
| | | SSDTDIREGAAAISEIGECSQETEGHKKATLLDLYSGCGAMSTGLCMGAQLSGLNLVTKW |
| | | AVDMNAHACKSLQHNHPETNVRNMTAEDFLFLLKEWEKLCIHFSLRNSPNSEEYANLHGL |
| | | NNVEDNEDVSEESENEDDGEVFTVDKIVGISFGVPKKLLKRGLYLKVRWLNYDDSHDTWE |
| | | PIEGLSNCRGKIEEFVKLGYKSGILPLPGGVDVVCGGPPCQGISGHNRFRNLLDPLEDQK |
| | | NKQLLVYMNIVEYLKPKFVLMENVVDMLKMAKGYLARFAVGRLLQMNYQVRNGMMAAGAY |
| | | GLAQFRLRFFLWGALPSEIIPQFPLPTHDLVHRGNIVKEFQGNIVAYDEGHTVKLADKLL |
| | | LKDVISDLPAVANSEKRDEITYDKDPTTPFQKFIRLRKDEASGSQSKSKSKKHVLYDHHP |
| | | LNLNINDYERVCQVPKRKGANFRDFPGVIVGPGNVVKLEEGKERVKLESGKTLVPDYALT |
| | | YVDGKSCKPFGRLWWDEIVPTVVTRAEPHNQVIIHPEQNRVLSIRENARLQGFPDDYKLF |
| | | GPPKQKYIQVGNAVAVPVAKALGYALGTAFQGLAVGKDPLLTLPEGFAFMKPTLPSELA |
| 1055 | Neurospora Rid | MAEQNPFVIDDEDDVIQIHDEEEVEEEVAEVIDITEDDIEPSELDRAFGSRPKEETLPSL |
| | | LLRDQGFIVRPGMTVELKAPIGRFAISFVRVNSIVKVRQAHVNNVTIRGHGFTRAKEMNG |
| | | MLPKQLNECCLVASIDTRDPRP |
| 1056 | E. coli strain | MNNNDLVAKLWKLCDNLRDGGVSYQNYVNELASLLFLKMCKETGQEAEYLPEGYRWDDLK |
| | 12 hsdM | SRIGQEQLQFYRKMLVHLGEDDKKLVQAVFHNVSTTITEPKQITALVSNMDSLDWYNGAH |
| | | GKSRDDFGDMYEGLLQKNANETKSGAGQYFTPRPLIKTIIHLLKPQPREVVQDPAAGTAG |
| | | FLIEADRYVKSQTNDLDDLDGDTQDFQIHRAFIGLELVPGTRRLALMNCLLHDIEGNLDH |
| | | GGAIRLGNTLGSDGENLPKAHIVATNPPFGSAAGTNITRTFVHPTSNKQLCFMQHIIETL |
| | | HPGGRAAVVVPDNVLFEGGKGTDIRRDLMDKCHLHTILRLPTGIFYAQGVKTNVLFFTKG |
| | | TVANPNQDKNCTDDVWVYDLRTNMPSFGKRTPFTDEHLQPFERVYGEDPHGLSPRTEGEW |
| | | SFNAEETEVADSEENKNTDQHLATSRWRKFSREWIRTAKSDSLDISWLKDKDSIDADSLP |
| | | EPDVLAAEAMGELVQALSELDALMRELGASDEADLQRQLLEEAFGGVKE |
| 1057 | E. coli strain | MSAGKLPEGWVIAPVSTVTTLIRGVTYKKEQAINYLKDDYLPLIRANNIQNGKFDTTDLV |
| | 12 hsdS | FVPKNLVKESQKISPEDIVIAMSSGSKSVVGKSAHQHLPFECSFGAFCGVLRPEKLIFSG |
| | | FIAHFTKSSLYRNKISSLSAGANINNIKPASFDLINIPIPPLAEQKIIAEKLDTLLAQVD |
| | | STKARFEQIPQILKRFRQAVLGGAVNGKLTEKWRNFEPQHSVFKKLNFESILTELRNGLS |
| | | SKPNESGVGHPILRISSVRAGHVDQNDIRFLECSESELNRHKLQDGDLLFTRYNGSLEFV |
| | | GVCGLLKKLQHQNLLYPDKLIRARLTKDALPEYIEIFFSSPSARNAMMNCVKTTSGQKGI |
| | | SGKDIKSQVVLLPPVKEQAEIVRRVEQLFAYADTIEKQVNNALARVNNLTQSILAKAFRG |
| | | ELTAQWRAENPDLISGENSAAALLEKIKAERAASGGKKASRKKS |
| 1058 | T. aquaticus M | MGLPPLLSLPSNSAPRSLGRVETPPEVVDEMVSLAEAPRGGRVLEPACAHGPFLRAFREA |
| | TaqI | HGTAYRFVGVEIDPKALDLPPWAEGILADFLLWEPGEAFDLILGNPPYGIVGEASKYPIH |
| | | VFKAVKDLYKKAFSTWKGKYNLYGAFLEKAVRLLKPGGVLVFVVPATWLVLEDFALLREF |
| | | LAREGKTSVYYLGEVFPQKKVSAVVIRFQKSGKGLSLWDTQESESGFTPILWAEYPHWEG |
| | | EIIRFETEETRKLEISGMPLGDLFHIRFAARSPEFKKHPAVRKEPGPGLVPVLTGRNLKP |
| | | GWVDYEKNHSGLWMPKERAKELRDFYATPHLVVAHTKGTRVVAAWDERAYPWREEFHLLP |
| | | KEGVRLDPSSLVQWLNSEAMQKHVRTLYRDFVPHLTLRMLERLPVRREYGFHTSPESARN |
| | | F |
| 1059 | E. coli M | MKKNRAFLKWAGGKYPLLDDIKRHLPKGECLVEPFVGAGSVFLNTDFSRYILADINSDLI |
| | EcoDam | SLYNIVKMRTDEYVQAARELFVPETNCAEVYYQFREEFNKSQDPFRRAVLFLYLNRYGYN |
| | | GLCRYNLRGEFNVPFGRYKKPYFPEAELYHFAEKAQNAFFYCESYADSMARADDASVVYC |
| | | DPPYAPLSATANFTAYHTNSFTLEQQAHLAEIAEGLVERHIPVLISNHDTMLTREWYQRA |
| | | KLHVVKVRRSISSNGGTRKKVDELLALYKPGVVSPAKK |
| 1060 | C. crescentus M | MKFGPETIIHGDCIEQMNALPEKSVDLIFADPPYNLQLGGDLLRPDNSKVDAVDDHWDQF |
| | CcrMI | ESFAAYDKFTREWLKAARRVLKDDGAIWVIGSYHNIFRVGVAVQDLGFWILNDIVWRKSN |
| | | PMPNFKGTRFANAHETLIWASKSQNAKRYTFNYDALKMANDEVQMRSDWTIPLCTGEERI |
| | | KGADGQKAHPTQKPEALLYRVILSTTKPGDVILDPFFGVGTTGAAAKRLGRKFIGIEREA |
| | | EYLEHAKARIAKVVPIAPEDLDVMGSKRAEPRVPFGTIVEAGLLSPGDTLYCSKGTHVAK |
| | | VRPDGSITVGDLSGSIHKIGALVQSAPACNGWTYWHFKTDAGLAPIDVLRAQVRAGMN |
| 1061 | C. difficile | MDDISQDNFLLSKEYENSLDVDTKKASGIYYTPKIIVDYIVKKTLKNHDIIKNPYPRILD |
| | CamA | ISCGCGNFLLEVYDILYDLFEENIYELKKKYDENYWTVDNIHRHILNYCIYGADIDEKAI |
| | | SILKDSLTNKKVVNDLDESDIKINLFCCDSLKKKWRYKFDYIVGNPPYIGHKKLEKKYKK |
| | | FLLEKYSEVYKDKADLYFCFYKKIIDILKQGGIGSVITPRYFLESLSGKDLREYIKSNVN |
| | | VQEIVDFLGANIFKNIGVSSCILTFDKKKTKETYIDVFKIKNEDICINKFETLEELLKSS |
| | | KFEHFNINQRLLSDEWILVNKDDETFYNKIQEKCKYSLEDIAISFQGIITGCDKAFILSK |
| | | DDVKLNLVDDKFLKCWIKSKNINKYIVDKSEYRLIYSNDIDNENTNKRILDEIIGLYKTK |
| | | LENRRECKSGIRKWYELQWGREKLFFERKKIMYPYKSNFNRFAIDYDNNFSSADVYSFFI |
| | | KEEYLDKFSYEYLVGILNSSVYDKYFKITAKKMSKNIYDYYPNKVMKIRIFRDNNYEEIE |
| | | NLSKQIISILLNKSIDKGKVEKLQIKMDNLIMDSLGI |
| 1062 | KAP1 | MAASAAAASAAAASAASGSPGPGEGSAGGEKRSTAPSAAASASASAAASSPAGGGAEALE |
| | | LLEHCGVCRERLRPEREPRLLPCLHSACSACLGPAAPAAANSSGDGGAAGDGTVVDCPVC |
| | | KQQCFSKDIVENYFMRDSGSKAATDAQDANQCCTSCEDNAPATSYCVECSEPLCETCVEA |
| | | HQRVKYTKDHTVRSTGPAKSRDGERTVYCNVHKHEPLVLFCESCDTLTCRDCQLNAHKDH |
| | | QYQFLEDAVRNQRKLLASLVKRLGDKHATLQKSTKEVRSSIRQVSDVQKRVQVDVKMAIL |
| | | QIMKELNKRGRVLVNDAQKVTEGQQERLERQHWTMTKIQKHQEHILRFASWALESDNNTA |
| | | LLLSKKLIYFQLHRALKMIVDPVEPHGEMKFQWDLNAWTKSAEAFGKIVAERPGTNSTGP |
| | | APMAPPRAPGPLSKQGSGSSQPMEVQEGYGFGSGDDPYSSAEPHVSGVKRSRSGEGEVSG |
| | | LMRKVPRVSLERLDLDLTADSQPPVFKVFPGSTTEDYNLIVIERGAAAAATGQPGTAPAG |
| | | TPGAPPLAGMAIVKEEETEAAIGAPPTATEGPETKPVLMALAEGPGAEGPRLASPSGSTS |
| | | SGLEVVAPEGTSAPGGGPGTLDDSATICRVCQKPGDLVMCNQCEFCFHLDCHLPALQDVP |
| | | GEEWSCSLCHVLPDLKEEDGSLSLDGADSTGVVAKLSPANQRKCERVLLALFCHEPCRPL |
| | | HQLATDSTFSLDQPGGTLDLTLIRARLQEKLSPPYSSPQEFAQDVGRMFKQFNKLTEDKA |
| | | DVQSIIGLQRFFETRMNEAFGDTKFSAVLVEPPPMSLPGAGLSSQELSGGPGDGP |
| 1063 | MECP2 | MVAGMLGLREEKSEDQDLQGLKDKPLKFKKVKKDKKEEKEGKHEPVQPSAHHSAEPAEAG |
| | | KAETSEGSGSAPAVPEASASPKQRRSIIRDRGPMYDDPTLPEGWTRKLKQRKSGRSAGKY |
| | | DVYLINPQGKAFRSKVELIAYFEKVGDTSLDPNDFDFTVTGRGSPSRREQKPPKKPKSPK |
| | | APGTGRGRGRPKGSGTTRPKAATSEGVQVKRVLEKSPGKLLVKMPFQTSPGGKAEGGGAT |
| | | TSTQVMVIKRPGRKRKAEADPQAIPKKRGRKPGSVVAAAAAEAKKKAVKESSIRSVQETV |
| | | LPIKKRKTRETVSIEVKEVVKPLLVSTLGEKSGKGLKTCKSPGRKSKESSPKGRSSSASS |
| | | PPKKEHHHHHHHSESPKAPVPLLPPLPPPPPEPESSEDPTSPPEPQDLSSSVCKEEKMPR |
| | | GGSLESDGCPKEPAKTQPAVATAATAAEKYKHRGEGERKDIVSSSMPRPNREEPVDSRTP |
| | | VTERVS |
| 1064 | linker | SGSETPGTSESATPES |
| 1065 | linker | SGGS |
| 1066 | linker | SGGSSGSETPGTSESATPESSGGS |
| 1067 | linker | SGGSSGGSSGSETPGTSESATPESSGGSSGGS |
| 1068 | linker | GGSGGSPGSPAGSPTSTEEGTSESATPESGPGTSTEPSEGSAPGSPAGSPTSTEEGTSTE |
| | | PSEGSAPGTSTEPSEGSAPGTSESATPESGPGSEPATSGGSGGS |
| 1069 | XTEN linker | SGSETPGTSESATPES |
| | (XTEN16) | |
| 1070 | XTEN linker | SGGSSGGSSGSETPGTSESATPES |
| 1071 | XTEN linker | SGGSSGGSSGSETPGTSESATPESSGGSSGGSSGGSSGGS |
| 1072 | XTEN linker | SGGSSGGSSGSETPGTSESATPESSGGSSGGSSGGSSGGSSGSETPGTSESATPESSGGS |
| | | SGGS |
| 1073 | XTEN linker | PGSPAGSPTSTEEGTSESATPESGPGTSTEPSEGSAPGSPAGSPTSTEEGTSTEPSEGSA |
| | | PGTSTEPSEGSAPGTSESATPESGPGSEPATS |
| 1074 | NLS | PKKKRKV |
| 1075 | NLS | AVKRPAATKKAGQAKKKKLD |
| 1076 | NLS | MSRRRKANPTKLSENAKKLAKEVEN |
| 1077 | NLS | PAAKRVKLD |
| 1078 | NLS | KLKIKRPVK |
| 1079 | NLS | MDSLLMNRRKFLYQFKNVRWAKGRRETYLC |
| 1092 | XTEN linker | GGPSSGAPPPSGGSPAGSPTSTEEGTSESATPESGPGTSTEPSEGSAPGSPAGSPTSTEE |
| | (XTEN80) | GTSTEPSEGSAPGTSTEPSE |
| 1236 | Plasmid for | CGTCGATCGACGGATCGGGAGATCTCCCGATCCCCTATGGTGCACTCTCAGTACAATCTG |
| | fusion protein | CTCTGATGCCGCATAGTTAAGCCAGTATCTGCTCCCTGCTTGTGTGTTGGAGGTCGCTGA |
| | with mRNA001 | GTAGTGCGCGAGCAAAATTTAAGCTACAACAAGGCAAGGCTTGACCGACAATTGCATGAA |
| | | GAATCTGCTTAGGGTTAGGCGTTTTGCGCTGCTTCGCGATGTACGGGCCAGATATACGCG |
| | | TTGACATTGATTATTGACTAGTTATTAATAGTAATCAATTACGGGGTCATTAGTTCATAG |
| | | CCCATATATGGAGTTCCGCGTTACATAACTTACGGTAAATGGCCCGCCTGGCTGACCGCC |
| | | CAACGACCCCCGCCCATTGACGTCAATAATGACGTATGTTCCCATAGTAACGCCAATAGG |
| | | GACTTTCCATTGACGTCAATGGGTGGAGTATTTACGGTAAACTGCCCACTTGGCAGTACA |
| | | TCAAGTGTATCATATGCCAAGTACGCCCCCTATTGACGTCAATGACGGTAAATGGCCCGC |
| | | CTGGCATTATGCCCAGTACATGACCTTATGGGACTTTCCTACTTGGCAGTACATCTACGT |
| | | ATTAGTCATCGCTATTACCATGGTGATGCGGTTTTGGCAGTACATCAATGGGCGTGGATA |
| | | GCGGTTTGACTCACGGGGATTTCCAAGTCTCCACCCCATTGACGTCAATGGGAGTTTGTT |
| | | TTGGCACCAAAATCAACGGGACTTTCCAAAATGTCGTAACAACTCCGCCCCATTGACGCA |
| | | AATGGGCGGTAGGCGTGTACGGTGGGAGGTCTATATAAGCAGAGCTCTCTGGCTAACTAG |
| | | AGAACCCACTGCTTACTGGCTTATCGAAATTAATACGACTCACTATAAGGAGACCCAAGC |
| | | TACCGGTGCCACCATGTACCCATACGATGTTCCAGATTACGCTTCGCCGAAGAAAAAGCG |
| | | CAAGGTCAATCACGATCAGGAGTTCGACCCCCCTAAGGTGTACCCACCAGTGCCTGCAGA |
| | | GAAGAGGAAGCCAATCCGGGTGCTGAGCCTGTTTGATGGCATCGCCACCGGCCTGCTGGT |
| | | GCTGAAGGATCTGGGCATCCAGGTGGACCGGTACATCGCCTCCGAGGTGTGCGAGGATTC |
| | | TATCACCGTGGGCATGGTGCGCCACCAGGGCAAGATCATGTATGTGGGCGACGTGCGGTC |
| | | CGTGACACAGAAGCACATCCAGGAGTGGGGCCCATTCGATCTGGTGATCGGCGGCAGCCC |
| | | CTGTAATGACCTGTCCATCGTGAACCCTGCAAGGAAGGGACTGTACGAGGGAACCGGCCG |
| | | GCTGTTCTTTGAGTTTTATAGACTGCTGCACGACGCCAGGCCTAAGGAGGGCGACGATAG |
| | | ACCATTCTTTTGGCTGTTCGAGAATGTGGTGGCTATGGGCGTGAGCGATAAGAGGGACAT |
| | | CTCCAGGTTTCTGGAGTCTAACCCCGTGATGATCGATGCAAAGGAGGTGTCCGCCGCACA |
| | | CAGAGCCAGGTATTTCTGGGGCAATCTGCCAGGAATGAACAGGCCACTGGCAAGCACCGT |
| | | GAATGACAAGCTGGAGCTGCAGGAGTGCCTGGAGCACGGAAGGATCGCCAAGTTTTCCAA |
| | | GGTGCGCACAATCACCACACGGAGCAATTCCATCAAGCAGGGCAAGGATCAGCACTTCCC |
| | | CGTGTTCATGAACGAGAAGGAGGACATCCTGTGGTGTACCGAGATGGAGAGAGTGTTCGG |
| | | CTTTCCAGTGCACTACACAGACGTGTCTAACATGAGCAGGCTGGCAAGGCAGCGGCTGCT |
| | | GGGCAGATCTTGGAGCGTGCCCGTGATCAGGCACCTGTTCGCCCCTCTGAAGGAGTATTT |
| | | TGCCTGCGTGAGCAGCGGCAACTCCAATGCCAACAGCCGGGGCCCCTCTTTCAGCTCCGG |
| | | ATTGGTGCCTCTGAGCCTGAGGGGCTCCCACATGGCAGCAATCCCCGCCCTGGACCCCGA |
| | | GGCCGAGCCTAGCATGGACGTGATCCTGGTGGGCTCTAGCGAGCTGTCCTCTAGCGTGTC |
| | | TCCAGGAACCGGAAGGGATCTGATCGCATACGAGGTGAAGGCCAATCAGCGGAACATCGA |
| | | GGACATCTGTATCTGCTGTGGCAGCCTGCAGGTGCACACACAGCACCCACTGTTCGAGGG |
| | | AGGAATCTGCGCACCCTGTAAGGATAAGTTCCTGGACGCCCTGTTTCTGTACGACGATGA |
| | | CGGCTACCAGTCCTATTGCTCTATCTGCTGTTCCGGCGAGACCCTGCTGATCTGCGGCAA |
| | | TCCAGATTGTACAAGGTGCTATTGTTTTGAGTGCGTGGACTCTCTGGTGGGACCAGGCAC |
| | | CAGCGGAAAGGTGCACGCCATGTCCAACTGGGTGTGCTACCTGTGCCTGCCATCCTCTCG |
| | | CAGCGGACTGCTGCAGCGGAGAAGGAAGTGGAGATCCCAGCTGAAGGCCTTCTATGATAG |
| | | GGAGTCTGAGAACCCCCTGGAGATGTTTGAGACCGTGCCAGTGTGGCGCCGGCAGCCCGT |
| | | GAGGGTGCTGAGCCTGTTCGAGGATATCAAGAAGGAGCTGACATCCCTGGGCTTTCTGGA |
| | | GTCCGGCTCTGACCCCGGACAGCTGAAGCACGTGGTGGATGTGACCGACACAGTGCGGAA |
| | | GGATGTGGAGGAGTGGGGCCCTTTCGACCTGGTGTACGGAGCAACCCCTCCACTGGGACA |
| | | CACATGCGACAGACCCCCTTCTTGGTACCTGTTCCAGTTTCACCGCCTGCTGCAGTATGC |
| | | AAGGCCAAAGCCAGGCAGCCCTAGACCATTCTTTTGGATGTTCGTGGATAATCTGGTGCT |
| | | GAACAAGGAGGATCTGGACGTGGCCAGCAGGTTTCTGGAGATGGAGCCAGTGACCATCCC |
| | | AGACGTGCACGGCGGCTCCCTGCAGAATGCCGTGCGCGTGTGGTCTAACATCCCTGCCAT |
| | | CAGAAGCAGGCACTGGGCACTGGTGAGCGAGGAGGAGCTGTCCCTGCTGGCCCAGAATAA |
| | | GCAGAGCAGCAAGCTGGCCGCCAAGTGGCCTACAAAGCTGGTGAAGAACTGCTTCCTGCC |
| | | ACTGCGGGAGTACTTCAAGTATTTTTCCACCGAGCTGACATCTAGCCTGGGAGGACCCTC |
| | | CTCTGGCGCCCCACCACCTAGCGGCGGCTCCCCTGCCGGCTCTCCAACCAGCACAGAGGA |
| | | GGGCACCAGCGAGTCCGCCACACCAGAGTCTGGACCTGGCACCAGCACAGAGCCATCCGA |
| | | GGGCTCTGCCCCAGGCTCTCCTGCAGGCAGCCCTACCTCCACCGAAGAGGGCACCAGCAC |
| | | AGAGCCTTCTGAGGGCAGCGCCCCAGGCACCTCTACAGAGCCAAGCGAGCTCGAGTCCCG |
| | | GCCAGGGGAACGGCCCTTCCAGTGTCGGATCTGCATGAGAAACTTTTCAAAGAAGTTCAA |
| | | TCTCCTTCAGCATACCCGGACCCACACTGGAGAGAAACCCTTTCAGTGCAGGATATGTAT |
| | | GCGGAATTTTTCCCGGCAAGATAATTTGAATTCCCATTTGAGAACACATACCGGGAGTCA |
| | | GAAGCCTTTCCAATGCCGGATTTGCATGAGGAACTTCTCCCGAAGCCATAATTTGAAACT |
| | | CCATACTAGAACACATACAGGCGAGAAGCCATTCCAGTGTAGGATCTGCATGCGCAATTT |
| | | TAGCCAATCAACCACTCTTAAACGCCATCTGAGAACGCATACAGGTAGTCAGAAGCCTTT |
| | | TCAGTGCAGGATCTGCATGAGGAATTTTAGTCGCAACACGAACTTGACTAGACACACAAG |
| | | AACGCATACTGGAGAGAAGCCCTTTCAGTGTAGGATTTGTATGCGGAACTTCAGCATTAA |
| | | ACACAACCTGGCAAGGCATCTGAGGACTCATTTGCGCGGGTCTAGCCCCAAGAAGAAGAG |
| | | AAAGGTGGGAGTCGACGGATCCAGCGGCTCCGAGACCCCAGGCACATCTGAGAGCGCCAC |
| | | CCCTGAGTCCCGGACCCTGGTGACATTCAAGGACGTGTTCGTGGACTTCACCCGGGAGGA |
| | | GTGGAAGCTGCTGGACACAGCCCAGCAGATCGTGTACAGGAACGTGATGCTGGAGAACTA |
| | | TAAGAATCTGGTGTCTCTGGGCTACCAGCTGACAAAGCCAGATGTGATCCTGCGGCTGGA |
| | | GAAGGGAGAGGAGCCCTGGCTGGTGTAGTCTAGAAATCAACCTCTGGATTACAAAATTTG |
| | | TGAAAGATTGACTGGTATTCTTAACTATGTTGCTCCTTTTACGCTATGTGGATACGCTGC |
| | | TTTAATGCCTTTGTATCATGCTATTGCTTCCCGTATGGCTTTCATTTTCTCCTCCTTGTA |
| | | TAAATCCTGGTTGCTGTCTCTTTATGAGGAGTTGTGGCCCGTTGTCAGGCAACGTGGCGT |
| | | GGTGTGCACTGTGTTTGCTGACGCAACCCCCACTGGTTGGGGCATTGCCACCACCTGTCA |
| | | GCTCCTTTCCGGGACTTTCGCTTTCCCCCTCCCTATTGCCACGGCGGAACTCATCGCCGC |
| | | CTGCCTTGCCCGCTGCTGGACAGGGGCTCGGCTGTTGGGCACTGACAATTCCGTGGTGTT |
| | | GTCGGGGAAATCATCGTCCTTTCCTTGGCTGCTCGCCTGTGTTGCCACCTGGATTCTGCG |
| | | CGGGACGTCCTTCTGCTACGTCCCTTCGGCCCTCAATCCAGCGGACCTTCCTTCCCGCGG |
| | | CCTGCTGCCGGCTCTGCGGCCTCTTCCGCGTCTTCGCCTTCGCCCTCAGACGAGTCGGAT |
| | | CTCCCTTTGGGCCGCCTCCCCGCCTGTTAATTAAAAAAAAAAAAAAAAAAAAAAAAAAAA |
| | | AAAAAAAAAAAAAAAAAAAAAAAACTAGTGGCGCCTGATGCGGTATTTTCTCCTTACGCA |
| | | TCTGTGCGGTATTTCACACCGCATAATCCAGCACAGTGGCGGCCCGTTTAAACCCGCTGA |
| | | TCAGCCTCGACTGTGCCTTCTAGTTGCCAGCCATCTGTTGTTTGCCCCTCCCCCGTGCCT |
| | | TCCTTGACCCTGGAAGGTGCCACTCCCACTGTCCTTTCCTAATAAAATGAGGAAATTGCA |
| | | TCGCATTGTCTGAGTAGGTGTCATTCTATTCTGGGGGGTGGGGTGGGGCAGGACAGCAAG |
| | | GGGGAGGATTGGGAAGACAATAGCAGGCATGCTGGGGATGCGGTGGGCTCTATGGCTTCT |
| | | GAGGCGGAAAGAACCAGCTGCATTAATGAATCGGCCAACGCGCGGGGAGAGGCGGTTTGC |
| | | GTATTGGGCGCTCTTCCGCTTCCTCGCTCACTGACTCGCTGCGCTCGGTCGTTCGGCTGC |
| | | GGCGAGCGGTATCAGCTCACTCAAAGGCGGTAATACGGTTATCCACAGAATCAGGGGATA |
| | | ACGCAGGAAAGAACATGTGAGCAAAAGGCCAGCAAAAGGCCAGGAACCGTAAAAAGGCCG |
| | | CGTTGCTGGCGTTTTTCCATAGGCTCCGCCCCCCTGACGAGCATCACAAAAATCGACGCT |
| | | CAAGTCAGAGGTGGCGAAACCCGACAGGACTATAAAGATACCAGGCGTTTCCCCCTGGAA |
| | | GCTCCCTCGTGCGCTCTCCTGTTCCGACCCTGCCGCTTACCGGATACCTGTCCGCCTTTC |
| | | TCCCTTCGGGAAGCGTGGCGCTTTCTCATAGCTCACGCTGTAGGTATCTCAGTTCGGTGT |
| | | AGGTCGTTCGCTCCAAGCTGGGCTGTGTGCACGAACCCCCCGTTCAGCCCGACCGCTGCG |
| | | CCTTATCCGGTAACTATCGTCTTGAGTCCAACCCGGTAAGACACGACTTATCGCCACTGG |
| | | CAGCAGCCACTGGTAACAGGATTAGCAGAGCGAGGTATGTAGGCGGTGCTACAGAGTTCT |
| | | TGAAGTGGTGGCCTAACTACGGCTACACTAGAAGAACAGTATTTGGTATCTGCGCTCTGC |
| | | TGAAGCCAGTTACCTTCGGAAAAAGAGTTGGTAGCTCTTGATCCGGCAAACAAACCACCG |
| | | CTGGTAGCGGTTTTTTTGTTTGCAAGCAGCAGATTACGCGCAGAAAAAAAGGATCTCAAG |
| | | AAGATCCTTTGATCTTTTCTACGGGGTCTGACGCTCAGTGGAACGAAAACTCACGTTAAG |
| | | GGATTTTGGTCATGAGATTATCAAAAAGGATCTTCACCTAGATCCTTTTAAATTAAAAAT |
| | | GAAGTTTTAAATCAATCTAAAGTATATATGAGTAAACTTGGTCTGACAGTTACCAATGCT |
| | | TAATCAGTGAGGCACCTATCTCAGCGATCTGTCTATTTCGTTCATCCATAGTTGCCTGAC |
| | | TCCCCGTCGTGTAGATAACTACGATACGGGAGGGCTTACCATCTGGCCCCAGTGCTGCAA |
| | | TGATACCGCGAGACCCACGCTCACCGGCTCCAGATTTATCAGCAATAAACCAGCCAGCCG |
| | | GAAGGGCCGAGCGCAGAAGTGGTCCTGCAACTTTATCCGCCTCCATCCAGTCTATTAATT |
| | | GTTGCCGGGAAGCTAGAGTAAGTAGTTCGCCAGTTAATAGTTTGCGCAACGTTGTTGCCA |
| | | TTGCTACAGGCATCGTGGTGTCACGCTCGTCGTTTGGTATGGCTTCATTCAGCTCCGGTT |
| | | CCCAACGATCAAGGCGAGTTACATGATCCCCCATGTTGTGCAAAAAAGCGGTTAGCTCCT |
| | | TCGGTCCTCCGATCGTTGTCAGAAGTAAGTTGGCCGCAGTGTTATCACTCATGGTTATGG |
| | | CAGCACTGCATAATTCTCTTACTGTCATGCCATCCGTAAGATGCTTTTCTGTGACTGGTG |
| | | AGTACTCAACCAAGTCATTCTGAGAATAGTGTATGCGGCGACCGAGTTGCTCTTGCCCGG |
| | | CGTCAATACGGGATAATACCGCGCCACATAGCAGAACTTTAAAAGTGCTCATCATTGGAA |
| | | AACGTTCTTCGGGGCGAAAACTCTCAAGGATCTTACCGCTGTTGAGATCCAGTTCGATGT |
| | | AACCCACTCGTGCACCCAACTGATCTTCAGCATCTTTTACTTTCACCAGCGTTTCTGGGT |
| | | GAGCAAAAACAGGAAGGCAAAATGCCGCAAAAAAGGGAATAAGGGCGACACGGAAATGTT |
| | | GAATACTCATACTCTTCCTTTTTCAATATTATTGAAGCATTTATCAGGGTTATTGTCTCA |
| | | TGAGCGGATACATATTTGAATGTATTTAGAAAAATAAACAAATAGGGGTTCCGCGCACAT |
| | | TTCCCCGAAAAGTGCCACCTGA |
| 1237 | Plasmid for | CGTCGATCGACGGATCGGGAGATCTCCCGATCCCCTATGGTGCACTCTCAGTACAATCTG |
| | fusion protein | CTCTGATGCCGCATAGTTAAGCCAGTATCTGCTCCCTGCTTGTGTGTTGGAGGTCGCTGA |
| | with mRNA002 | GTAGTGCGCGAGCAAAATTTAAGCTACAACAAGGCAAGGCTTGACCGACAATTGCATGAA |
| | | GAATCTGCTTAGGGTTAGGCGTTTTGCGCTGCTTCGCGATGTACGGGCCAGATATACGCG |
| | | TTGACATTGATTATTGACTAGTTATTAATAGTAATCAATTACGGGGTCATTAGTTCATAG |
| | | CCCATATATGGAGTTCCGCGTTACATAACTTACGGTAAATGGCCCGCCTGGCTGACCGCC |
| | | CAACGACCCCCGCCCATTGACGTCAATAATGACGTATGTTCCCATAGTAACGCCAATAGG |
| | | GACTTTCCATTGACGTCAATGGGTGGAGTATTTACGGTAAACTGCCCACTTGGCAGTACA |
| | | TCAAGTGTATCATATGCCAAGTACGCCCCCTATTGACGTCAATGACGGTAAATGGCCCGC |
| | | CTGGCATTATGCCCAGTACATGACCTTATGGGACTTTCCTACTTGGCAGTACATCTACGT |
| | | ATTAGTCATCGCTATTACCATGGTGATGCGGTTTTGGCAGTACATCAATGGGCGTGGATA |
| | | GCGGTTTGACTCACGGGGATTTCCAAGTCTCCACCCCATTGACGTCAATGGGAGTTTGTT |
| | | TTGGCACCAAAATCAACGGGACTTTCCAAAATGTCGTAACAACTCCGCCCCATTGACGCA |
| | | AATGGGCGGTAGGCGTGTACGGTGGGAGGTCTATATAAGCAGAGCTCTCTGGCTAACTAG |
| | | AGAACCCACTGCTTACTGGCTTATCGAAATTAATACGACTCACTATAAGGAGACCCAAGC |
| | | TACCGGTGCCACCATGTACCCATACGATGTTCCAGATTACGCTTCGCCGAAGAAAAAGCG |
| | | CAAGGTCAATCACGATCAGGAGTTCGACCCCCCTAAGGTGTACCCACCAGTGCCTGCAGA |
| | | GAAGAGGAAGCCAATCCGGGTGCTGAGCCTGTTTGATGGCATCGCCACCGGCCTGCTGGT |
| | | GCTGAAGGATCTGGGCATCCAGGTGGACCGGTACATCGCCTCCGAGGTGTGCGAGGATTC |
| | | TATCACCGTGGGCATGGTGCGCCACCAGGGCAAGATCATGTATGTGGGCGACGTGCGGTC |
| | | CGTGACACAGAAGCACATCCAGGAGTGGGGCCCATTCGATCTGGTGATCGGCGGCAGCCC |
| | | CTGTAATGACCTGTCCATCGTGAACCCTGCAAGGAAGGGACTGTACGAGGGAACCGGCCG |
| | | GCTGTTCTTTGAGTTTTATAGACTGCTGCACGACGCCAGGCCTAAGGAGGGCGACGATAG |
| | | ACCATTCTTTTGGCTGTTCGAGAATGTGGTGGCTATGGGCGTGAGCGATAAGAGGGACAT |
| | | CTCCAGGTTTCTGGAGTCTAACCCCGTGATGATCGATGCAAAGGAGGTGTCCGCCGCACA |
| | | CAGAGCCAGGTATTTCTGGGGCAATCTGCCAGGAATGAACAGGCCACTGGCAAGCACCGT |
| | | GAATGACAAGCTGGAGCTGCAGGAGTGCCTGGAGCACGGAAGGATCGCCAAGTTTTCCAA |
| | | GGTGCGCACAATCACCACACGGAGCAATTCCATCAAGCAGGGCAAGGATCAGCACTTCCC |
| | | CGTGTTCATGAACGAGAAGGAGGACATCCTGTGGTGTACCGAGATGGAGAGAGTGTTCGG |
| | | CTTTCCAGTGCACTACACAGACGTGTCTAACATGAGCAGGCTGGCAAGGCAGCGGCTGCT |
| | | GGGCAGATCTTGGAGCGTGCCCGTGATCAGGCACCTGTTCGCCCCTCTGAAGGAGTATTT |
| | | TGCCTGCGTGAGCAGCGGCAACTCCAATGCCAACAGCCGGGGCCCCTCTTTCAGCTCCGG |
| | | ATTGGTGCCTCTGAGCCTGAGGGGCTCCCACATGGCAGCAATCCCCGCCCTGGACCCCGA |
| | | GGCCGAGCCTAGCATGGACGTGATCCTGGTGGGCTCTAGCGAGCTGTCCTCTAGCGTGTC |
| | | TCCAGGAACCGGAAGGGATCTGATCGCATACGAGGTGAAGGCCAATCAGCGGAACATCGA |
| | | GGACATCTGTATCTGCTGTGGCAGCCTGCAGGTGCACACACAGCACCCACTGTTCGAGGG |
| | | AGGAATCTGCGCACCCTGTAAGGATAAGTTCCTGGACGCCCTGTTTCTGTACGACGATGA |
| | | CGGCTACCAGTCCTATTGCTCTATCTGCTGTTCCGGCGAGACCCTGCTGATCTGCGGCAA |
| | | TCCAGATTGTACAAGGTGCTATTGTTTTGAGTGCGTGGACTCTCTGGTGGGACCAGGCAC |
| | | CAGCGGAAAGGTGCACGCCATGTCCAACTGGGTGTGCTACCTGTGCCTGCCATCCTCTCG |
| | | CAGCGGACTGCTGCAGCGGAGAAGGAAGTGGAGATCCCAGCTGAAGGCCTTCTATGATAG |
| | | GGAGTCTGAGAACCCCCTGGAGATGTTTGAGACCGTGCCAGTGTGGCGCCGGCAGCCCGT |
| | | GAGGGTGCTGAGCCTGTTCGAGGATATCAAGAAGGAGCTGACATCCCTGGGCTTTCTGGA |
| | | GTCCGGCTCTGACCCCGGACAGCTGAAGCACGTGGTGGATGTGACCGACACAGTGCGGAA |
| | | GGATGTGGAGGAGTGGGGCCCTTTCGACCTGGTGTACGGAGCAACCCCTCCACTGGGACA |
| | | CACATGCGACAGACCCCCTTCTTGGTACCTGTTCCAGTTTCACCGCCTGCTGCAGTATGC |
| | | AAGGCCAAAGCCAGGCAGCCCTAGACCATTCTTTTGGATGTTCGTGGATAATCTGGTGCT |
| | | GAACAAGGAGGATCTGGACGTGGCCAGCAGGTTTCTGGAGATGGAGCCAGTGACCATCCC |
| | | AGACGTGCACGGCGGCTCCCTGCAGAATGCCGTGCGCGTGTGGTCTAACATCCCTGCCAT |
| | | CAGAAGCAGGCACTGGGCACTGGTGAGCGAGGAGGAGCTGTCCCTGCTGGCCCAGAATAA |
| | | GCAGAGCAGCAAGCTGGCCGCCAAGTGGCCTACAAAGCTGGTGAAGAACTGCTTCCTGCC |
| | | ACTGCGGGAGTACTTCAAGTATTTTTCCACCGAGCTGACATCTAGCCTGGGAGGACCCTC |
| | | CTCTGGCGCCCCACCACCTAGCGGCGGCTCCCCTGCCGGCTCTCCAACCAGCACAGAGGA |
| | | GGGCACCAGCGAGTCCGCCACACCAGAGTCTGGACCTGGCACCAGCACAGAGCCATCCGA |
| | | GGGCTCTGCCCCAGGCTCTCCTGCAGGCAGCCCTACCTCCACCGAAGAGGGCACCAGCAC |
| | | AGAGCCTTCTGAGGGCAGCGCCCCAGGCACCTCTACAGAGCCAAGCGAGCTCGAGTCCCG |
| | | GCCAGGGGAACGGCCCTTCCAGTGTCGGATCTGCATGAGAAACTTTTCAAAGAAGTTCAA |
| | | TCTGCTTCAGCACACCCGGACCCACACTGGAGAGAAACCCTTTCAGTGCAGGATATGTAT |
| | | GCGGAATTTTTCCCGAAAAGATTACTTGATTAGCCACCTCCGAACACATACCGGGAGTCA |
| | | GAAGCCTTTCCAATGCCGGATTTGCATGAGGAACTTCTCCAGGAGCCACAACCTTAAACT |
| | | GCACACAAGAACACATACAGGCGAGAAGCCATTCCAGTGTAGGATCTGCATGCGCAATTT |
| | | TAGCCAATCCACAACATTGAAAAGACATCTTCGGACGCATACAGGTAGTCAGAAGCCTTT |
| | | TCAGTGCAGGATCTGCATGAGGAATTTTAGTCGACAAGATAATCTTGGCCGACATCTTCG |
| | | AACGCATACTGGAGAGAAGCCCTTTCAGTGTAGGATTTGTATGCGGAACTTCAGCGTAGT |
| | | AAACAACTTGAACAGACACTTGAAAACTCATTTGCGCGGGTCTAGCCCCAAGAAGAAGAG |
| | | AAAGGTGGGAGTCGACGGATCCAGCGGCTCCGAGACCCCAGGCACATCTGAGAGCGCCAC |
| | | CCCTGAGTCCCGGACCCTGGTGACATTCAAGGACGTGTTCGTGGACTTCACCCGGGAGGA |
| | | GTGGAAGCTGCTGGACACAGCCCAGCAGATCGTGTACAGGAACGTGATGCTGGAGAACTA |
| | | TAAGAATCTGGTGTCTCTGGGCTACCAGCTGACAAAGCCAGATGTGATCCTGCGGCTGGA |
| | | GAAGGGAGAGGAGCCCTGGCTGGTGTAGTCTAGAAATCAACCTCTGGATTACAAAATTTG |
| | | TGAAAGATTGACTGGTATTCTTAACTATGTTGCTCCTTTTACGCTATGTGGATACGCTGC |
| | | TTTAATGCCTTTGTATCATGCTATTGCTTCCCGTATGGCTTTCATTTTCTCCTCCTTGTA |
| | | TAAATCCTGGTTGCTGTCTCTTTATGAGGAGTTGTGGCCCGTTGTCAGGCAACGTGGCGT |
| | | GGTGTGCACTGTGTTTGCTGACGCAACCCCCACTGGTTGGGGCATTGCCACCACCTGTCA |
| | | GCTCCTTTCCGGGACTTTCGCTTTCCCCCTCCCTATTGCCACGGCGGAACTCATCGCCGC |
| | | CTGCCTTGCCCGCTGCTGGACAGGGGCTCGGCTGTTGGGCACTGACAATTCCGTGGTGTT |
| | | GTCGGGGAAATCATCGTCCTTTCCTTGGCTGCTCGCCTGTGTTGCCACCTGGATTCTGCG |
| | | CGGGACGTCCTTCTGCTACGTCCCTTCGGCCCTCAATCCAGCGGACCTTCCTTCCCGCGG |
| | | CCTGCTGCCGGCTCTGCGGCCTCTTCCGCGTCTTCGCCTTCGCCCTCAGACGAGTCGGAT |
| | | CTCCCTTTGGGCCGCCTCCCCGCCTGTTAATTAAAAAAAAAAAAAAAAAAAAAAAAAAAA |
| | | AAAAAAAAAAAAAAAAAAAAAAAACTAGTGGCGCCTGATGCGGTATTTTCTCCTTACGCA |
| | | TCTGTGCGGTATTTCACACCGCATAATCCAGCACAGTGGCGGCCCGTTTAAACCCGCTGA |
| | | TCAGCCTCGACTGTGCCTTCTAGTTGCCAGCCATCTGTTGTTTGCCCCTCCCCCGTGCCT |
| | | TCCTTGACCCTGGAAGGTGCCACTCCCACTGTCCTTTCCTAATAAAATGAGGAAATTGCA |
| | | TCGCATTGTCTGAGTAGGTGTCATTCTATTCTGGGGGGTGGGGTGGGGCAGGACAGCAAG |
| | | GGGGAGGATTGGGAAGACAATAGCAGGCATGCTGGGGATGCGGTGGGCTCTATGGCTTCT |
| | | GAGGCGGAAAGAACCAGCTGCATTAATGAATCGGCCAACGCGCGGGGAGAGGCGGTTTGC |
| | | GTATTGGGCGCTCTTCCGCTTCCTCGCTCACTGACTCGCTGCGCTCGGTCGTTCGGCTGC |
| | | GGCGAGCGGTATCAGCTCACTCAAAGGCGGTAATACGGTTATCCACAGAATCAGGGGATA |
| | | ACGCAGGAAAGAACATGTGAGCAAAAGGCCAGCAAAAGGCCAGGAACCGTAAAAAGGCCG |
| | | CGTTGCTGGCGTTTTTCCATAGGCTCCGCCCCCCTGACGAGCATCACAAAAATCGACGCT |
| | | CAAGTCAGAGGTGGCGAAACCCGACAGGACTATAAAGATACCAGGCGTTTCCCCCTGGAA |
| | | GCTCCCTCGTGCGCTCTCCTGTTCCGACCCTGCCGCTTACCGGATACCTGTCCGCCTTTC |
| | | TCCCTTCGGGAAGCGTGGCGCTTTCTCATAGCTCACGCTGTAGGTATCTCAGTTCGGTGT |
| | | AGGTCGTTCGCTCCAAGCTGGGCTGTGTGCACGAACCCCCCGTTCAGCCCGACCGCTGCG |
| | | CCTTATCCGGTAACTATCGTCTTGAGTCCAACCCGGTAAGACACGACTTATCGCCACTGG |
| | | CAGCAGCCACTGGTAACAGGATTAGCAGAGCGAGGTATGTAGGCGGTGCTACAGAGTTCT |
| | | TGAAGTGGTGGCCTAACTACGGCTACACTAGAAGAACAGTATTTGGTATCTGCGCTCTGC |
| | | TGAAGCCAGTTACCTTCGGAAAAAGAGTTGGTAGCTCTTGATCCGGCAAACAAACCACCG |
| | | CTGGTAGCGGTTTTTTTGTTTGCAAGCAGCAGATTACGCGCAGAAAAAAAGGATCTCAAG |
| | | AAGATCCTTTGATCTTTTCTACGGGGTCTGACGCTCAGTGGAACGAAAACTCACGTTAAG |
| | | GGATTTTGGTCATGAGATTATCAAAAAGGATCTTCACCTAGATCCTTTTAAATTAAAAAT |
| | | GAAGTTTTAAATCAATCTAAAGTATATATGAGTAAACTTGGTCTGACAGTTACCAATGCT |
| | | TAATCAGTGAGGCACCTATCTCAGCGATCTGTCTATTTCGTTCATCCATAGTTGCCTGAC |
| | | TCCCCGTCGTGTAGATAACTACGATACGGGAGGGCTTACCATCTGGCCCCAGTGCTGCAA |
| | | TGATACCGCGAGACCCACGCTCACCGGCTCCAGATTTATCAGCAATAAACCAGCCAGCCG |
| | | GAAGGGCCGAGCGCAGAAGTGGTCCTGCAACTTTATCCGCCTCCATCCAGTCTATTAATT |
| | | GTTGCCGGGAAGCTAGAGTAAGTAGTTCGCCAGTTAATAGTTTGCGCAACGTTGTTGCCA |
| | | TTGCTACAGGCATCGTGGTGTCACGCTCGTCGTTTGGTATGGCTTCATTCAGCTCCGGTT |
| | | CCCAACGATCAAGGCGAGTTACATGATCCCCCATGTTGTGCAAAAAAGCGGTTAGCTCCT |
| | | TCGGTCCTCCGATCGTTGTCAGAAGTAAGTTGGCCGCAGTGTTATCACTCATGGTTATGG |
| | | CAGCACTGCATAATTCTCTTACTGTCATGCCATCCGTAAGATGCTTTTCTGTGACTGGTG |
| | | AGTACTCAACCAAGTCATTCTGAGAATAGTGTATGCGGCGACCGAGTTGCTCTTGCCCGG |
| | | CGTCAATACGGGATAATACCGCGCCACATAGCAGAACTTTAAAAGTGCTCATCATTGGAA |
| | | AACGTTCTTCGGGGCGAAAACTCTCAAGGATCTTACCGCTGTTGAGATCCAGTTCGATGT |
| | | AACCCACTCGTGCACCCAACTGATCTTCAGCATCTTTTACTTTCACCAGCGTTTCTGGGT |
| | | GAGCAAAAACAGGAAGGCAAAATGCCGCAAAAAAGGGAATAAGGGCGACACGGAAATGTT |
| | | GAATACTCATACTCTTCCTTTTTCAATATTATTGAAGCATTTATCAGGGTTATTGTCTCA |
| | | TGAGCGGATACATATTTGAATGTATTTAGAAAAATAAACAAATAGGGGTTCCGCGCACAT |
| | | TTCCCCGAAAAGTGCCACCTGA |
| 1238 | Plasmid for | CGTCGATCGACGGATCGGGAGATCTCCCGATCCCCTATGGTGCACTCTCAGTACAATCTG |
| | fusion protein | CTCTGATGCCGCATAGTTAAGCCAGTATCTGCTCCCTGCTTGTGTGTTGGAGGTCGCTGA |
| | with mRNA0003 | GTAGTGCGCGAGCAAAATTTAAGCTACAACAAGGCAAGGCTTGACCGACAATTGCATGAA |
| | | GAATCTGCTTAGGGTTAGGCGTTTTGCGCTGCTTCGCGATGTACGGGCCAGATATACGCG |
| | | TTGACATTGATTATTGACTAGTTATTAATAGTAATCAATTACGGGGTCATTAGTTCATAG |
| | | CCCATATATGGAGTTCCGCGTTACATAACTTACGGTAAATGGCCCGCCTGGCTGACCGCC |
| | | CAACGACCCCCGCCCATTGACGTCAATAATGACGTATGTTCCCATAGTAACGCCAATAGG |
| | | GACTTTCCATTGACGTCAATGGGTGGAGTATTTACGGTAAACTGCCCACTTGGCAGTACA |
| | | TCAAGTGTATCATATGCCAAGTACGCCCCCTATTGACGTCAATGACGGTAAATGGCCCGC |
| | | CTGGCATTATGCCCAGTACATGACCTTATGGGACTTTCCTACTTGGCAGTACATCTACGT |
| | | ATTAGTCATCGCTATTACCATGGTGATGCGGTTTTGGCAGTACATCAATGGGCGTGGATA |
| | | GCGGTTTGACTCACGGGGATTTCCAAGTCTCCACCCCATTGACGTCAATGGGAGTTTGTT |
| | | TTGGCACCAAAATCAACGGGACTTTCCAAAATGTCGTAACAACTCCGCCCCATTGACGCA |
| | | AATGGGCGGTAGGCGTGTACGGTGGGAGGTCTATATAAGCAGAGCTCTCTGGCTAACTAG |
| | | AGAACCCACTGCTTACTGGCTTATCGAAATTAATACGACTCACTATAAGGAGACCCAAGC |
| | | TACCGGTGCCACCATGTACCCATACGATGTTCCAGATTACGCTTCGCCGAAGAAAAAGCG |
| | | CAAGGTCAATCACGATCAGGAGTTCGACCCCCCTAAGGTGTACCCACCAGTGCCTGCAGA |
| | | GAAGAGGAAGCCAATCCGGGTGCTGAGCCTGTTTGATGGCATCGCCACCGGCCTGCTGGT |
| | | GCTGAAGGATCTGGGCATCCAGGTGGACCGGTACATCGCCTCCGAGGTGTGCGAGGATTC |
| | | TATCACCGTGGGCATGGTGCGCCACCAGGGCAAGATCATGTATGTGGGCGACGTGCGGTC |
| | | CGTGACACAGAAGCACATCCAGGAGTGGGGCCCATTCGATCTGGTGATCGGCGGCAGCCC |
| | | CTGTAATGACCTGTCCATCGTGAACCCTGCAAGGAAGGGACTGTACGAGGGAACCGGCCG |
| | | GCTGTTCTTTGAGTTTTATAGACTGCTGCACGACGCCAGGCCTAAGGAGGGCGACGATAG |
| | | ACCATTCTTTTGGCTGTTCGAGAATGTGGTGGCTATGGGCGTGAGCGATAAGAGGGACAT |
| | | CTCCAGGTTTCTGGAGTCTAACCCCGTGATGATCGATGCAAAGGAGGTGTCCGCCGCACA |
| | | CAGAGCCAGGTATTTCTGGGGCAATCTGCCAGGAATGAACAGGCCACTGGCAAGCACCGT |
| | | GAATGACAAGCTGGAGCTGCAGGAGTGCCTGGAGCACGGAAGGATCGCCAAGTTTTCCAA |
| | | GGTGCGCACAATCACCACACGGAGCAATTCCATCAAGCAGGGCAAGGATCAGCACTTCCC |
| | | CGTGTTCATGAACGAGAAGGAGGACATCCTGTGGTGTACCGAGATGGAGAGAGTGTTCGG |
| | | CTTTCCAGTGCACTACACAGACGTGTCTAACATGAGCAGGCTGGCAAGGCAGCGGCTGCT |
| | | GGGCAGATCTTGGAGCGTGCCCGTGATCAGGCACCTGTTCGCCCCTCTGAAGGAGTATTT |
| | | TGCCTGCGTGAGCAGCGGCAACTCCAATGCCAACAGCCGGGGCCCCTCTTTCAGCTCCGG |
| | | ATTGGTGCCTCTGAGCCTGAGGGGCTCCCACATGGCAGCAATCCCCGCCCTGGACCCCGA |
| | | GGCCGAGCCTAGCATGGACGTGATCCTGGTGGGCTCTAGCGAGCTGTCCTCTAGCGTGTC |
| | | TCCAGGAACCGGAAGGGATCTGATCGCATACGAGGTGAAGGCCAATCAGCGGAACATCGA |
| | | GGACATCTGTATCTGCTGTGGCAGCCTGCAGGTGCACACACAGCACCCACTGTTCGAGGG |
| | | AGGAATCTGCGCACCCTGTAAGGATAAGTTCCTGGACGCCCTGTTTCTGTACGACGATGA |
| | | CGGCTACCAGTCCTATTGCTCTATCTGCTGTTCCGGCGAGACCCTGCTGATCTGCGGCAA |
| | | TCCAGATTGTACAAGGTGCTATTGTTTTGAGTGCGTGGACTCTCTGGTGGGACCAGGCAC |
| | | CAGCGGAAAGGTGCACGCCATGTCCAACTGGGTGTGCTACCTGTGCCTGCCATCCTCTCG |
| | | CAGCGGACTGCTGCAGCGGAGAAGGAAGTGGAGATCCCAGCTGAAGGCCTTCTATGATAG |
| | | GGAGTCTGAGAACCCCCTGGAGATGTTTGAGACCGTGCCAGTGTGGCGCCGGCAGCCCGT |
| | | GAGGGTGCTGAGCCTGTTCGAGGATATCAAGAAGGAGCTGACATCCCTGGGCTTTCTGGA |
| | | GTCCGGCTCTGACCCCGGACAGCTGAAGCACGTGGTGGATGTGACCGACACAGTGCGGAA |
| | | GGATGTGGAGGAGTGGGGCCCTTTCGACCTGGTGTACGGAGCAACCCCTCCACTGGGACA |
| | | CACATGCGACAGACCCCCTTCTTGGTACCTGTTCCAGTTTCACCGCCTGCTGCAGTATGC |
| | | AAGGCCAAAGCCAGGCAGCCCTAGACCATTCTTTTGGATGTTCGTGGATAATCTGGTGCT |
| | | GAACAAGGAGGATCTGGACGTGGCCAGCAGGTTTCTGGAGATGGAGCCAGTGACCATCCC |
| | | AGACGTGCACGGCGGCTCCCTGCAGAATGCCGTGCGCGTGTGGTCTAACATCCCTGCCAT |
| | | CAGAAGCAGGCACTGGGCACTGGTGAGCGAGGAGGAGCTGTCCCTGCTGGCCCAGAATAA |
| | | GCAGAGCAGCAAGCTGGCCGCCAAGTGGCCTACAAAGCTGGTGAAGAACTGCTTCCTGCC |
| | | ACTGCGGGAGTACTTCAAGTATTTTTCCACCGAGCTGACATCTAGCCTGGGAGGACCCTC |
| | | CTCTGGCGCCCCACCACCTAGCGGCGGCTCCCCTGCCGGCTCTCCAACCAGCACAGAGGA |
| | | GGGCACCAGCGAGTCCGCCACACCAGAGTCTGGACCTGGCACCAGCACAGAGCCATCCGA |
| | | GGGCTCTGCCCCAGGCTCTCCTGCAGGCAGCCCTACCTCCACCGAAGAGGGCACCAGCAC |
| | | AGAGCCTTCTGAGGGCAGCGCCCCAGGCACCTCTACAGAGCCAAGCGAGCTCGAGTCCCG |
| | | GCCAGGGGAACGGCCCTTCCAGTGTCGGATCTGCATGAGAAACTTTTCAAAAAAGTTTAA |
| | | CCTTCTCCAACACACACGAACCCACACTGGAGAGAAACCCTTTCAGTGCAGGATATGTAT |
| | | GCGGAATTTTTCCAGAAAAGATTATTTGATCAGTCATCTGCGAACACATACCGGGAGTCA |
| | | GAAGCCTTTCCAATGCCGGATTTGCATGAGGAACTTCTCCAGGAGTCATAACCTCCGGTT |
| | | GCACACACGCACACATACAGGCGAGAAGCCATTCCAGTGTAGGATCTGCATGCGCAATTT |
| | | TAGCCAGAGTACGACCCTGAAGAGACATCTGCGGACGCATACAGGTAGTCAGAAGCCTTT |
| | | TCAGTGCAGGATCTGCATGAGGAATTTTAGTCGGCAAGATAATTTGGGGAGACACTTGAG |
| | | AACGCATACTGGAGAGAAGCCCTTTCAGTGTAGGATTTGTATGCGGAACTTCAGCGTTGT |
| | | GAATAATTTGAATCGGCATCTCAAAACTCATTTGCGCGGGTCTAGCCCCAAGAAGAAGAG |
| | | AAAGGTGGGAGTCGACGGATCCAGCGGCTCCGAGACCCCAGGCACATCTGAGAGCGCCAC |
| | | CCCTGAGTCCCGGACCCTGGTGACATTCAAGGACGTGTTCGTGGACTTCACCCGGGAGGA |
| | | GTGGAAGCTGCTGGACACAGCCCAGCAGATCGTGTACAGGAACGTGATGCTGGAGAACTA |
| | | TAAGAATCTGGTGTCTCTGGGCTACCAGCTGACAAAGCCAGATGTGATCCTGCGGCTGGA |
| | | GAAGGGAGAGGAGCCCTGGCTGGTGTAGTCTAGAAATCAACCTCTGGATTACAAAATTTG |
| | | TGAAAGATTGACTGGTATTCTTAACTATGTTGCTCCTTTTACGCTATGTGGATACGCTGC |
| | | TTTAATGCCTTTGTATCATGCTATTGCTTCCCGTATGGCTTTCATTTTCTCCTCCTTGTA |
| | | TAAATCCTGGTTGCTGTCTCTTTATGAGGAGTTGTGGCCCGTTGTCAGGCAACGTGGCGT |
| | | GGTGTGCACTGTGTTTGCTGACGCAACCCCCACTGGTTGGGGCATTGCCACCACCTGTCA |
| | | GCTCCTTTCCGGGACTTTCGCTTTCCCCCTCCCTATTGCCACGGCGGAACTCATCGCCGC |
| | | CTGCCTTGCCCGCTGCTGGACAGGGGCTCGGCTGTTGGGCACTGACAATTCCGTGGTGTT |
| | | GTCGGGGAAATCATCGTCCTTTCCTTGGCTGCTCGCCTGTGTTGCCACCTGGATTCTGCG |
| | | CGGGACGTCCTTCTGCTACGTCCCTTCGGCCCTCAATCCAGCGGACCTTCCTTCCCGCGG |
| | | CCTGCTGCCGGCTCTGCGGCCTCTTCCGCGTCTTCGCCTTCGCCCTCAGACGAGTCGGAT |
| | | CTCCCTTTGGGCCGCCTCCCCGCCTGTTAATTAAAAAAAAAAAAAAAAAAAAAAAAAAAA |
| | | AAAAAAAAAAAAAAAAAAAAAAAACTAGTGGCGCCTGATGCGGTATTTTCTCCTTACGCA |
| | | TCTGTGCGGTATTTCACACCGCATAATCCAGCACAGTGGCGGCCCGTTTAAACCCGCTGA |
| | | TCAGCCTCGACTGTGCCTTCTAGTTGCCAGCCATCTGTTGTTTGCCCCTCCCCCGTGCCT |
| | | TCCTTGACCCTGGAAGGTGCCACTCCCACTGTCCTTTCCTAATAAAATGAGGAAATTGCA |
| | | TCGCATTGTCTGAGTAGGTGTCATTCTATTCTGGGGGGTGGGGTGGGGCAGGACAGCAAG |
| | | GGGGAGGATTGGGAAGACAATAGCAGGCATGCTGGGGATGCGGTGGGCTCTATGGCTTCT |
| | | GAGGCGGAAAGAACCAGCTGCATTAATGAATCGGCCAACGCGCGGGGAGAGGCGGTTTGC |
| | | GTATTGGGCGCTCTTCCGCTTCCTCGCTCACTGACTCGCTGCGCTCGGTCGTTCGGCTGC |
| | | GGCGAGCGGTATCAGCTCACTCAAAGGCGGTAATACGGTTATCCACAGAATCAGGGGATA |
| | | ACGCAGGAAAGAACATGTGAGCAAAAGGCCAGCAAAAGGCCAGGAACCGTAAAAAGGCCG |
| | | CGTTGCTGGCGTTTTTCCATAGGCTCCGCCCCCCTGACGAGCATCACAAAAATCGACGCT |
| | | CAAGTCAGAGGTGGCGAAACCCGACAGGACTATAAAGATACCAGGCGTTTCCCCCTGGAA |
| | | GCTCCCTCGTGCGCTCTCCTGTTCCGACCCTGCCGCTTACCGGATACCTGTCCGCCTTTC |
| | | TCCCTTCGGGAAGCGTGGCGCTTTCTCATAGCTCACGCTGTAGGTATCTCAGTTCGGTGT |
| | | AGGTCGTTCGCTCCAAGCTGGGCTGTGTGCACGAACCCCCCGTTCAGCCCGACCGCTGCG |
| | | CCTTATCCGGTAACTATCGTCTTGAGTCCAACCCGGTAAGACACGACTTATCGCCACTGG |
| | | CAGCAGCCACTGGTAACAGGATTAGCAGAGCGAGGTATGTAGGCGGTGCTACAGAGTTCT |
| | | TGAAGTGGTGGCCTAACTACGGCTACACTAGAAGAACAGTATTTGGTATCTGCGCTCTGC |
| | | TGAAGCCAGTTACCTTCGGAAAAAGAGTTGGTAGCTCTTGATCCGGCAAACAAACCACCG |
| | | CTGGTAGCGGTTTTTTTGTTTGCAAGCAGCAGATTACGCGCAGAAAAAAAGGATCTCAAG |
| | | AAGATCCTTTGATCTTTTCTACGGGGTCTGACGCTCAGTGGAACGAAAACTCACGTTAAG |
| | | GGATTTTGGTCATGAGATTATCAAAAAGGATCTTCACCTAGATCCTTTTAAATTAAAAAT |
| | | GAAGTTTTAAATCAATCTAAAGTATATATGAGTAAACTTGGTCTGACAGTTACCAATGCT |
| | | TAATCAGTGAGGCACCTATCTCAGCGATCTGTCTATTTCGTTCATCCATAGTTGCCTGAC |
| | | TCCCCGTCGTGTAGATAACTACGATACGGGAGGGCTTACCATCTGGCCCCAGTGCTGCAA |
| | | TGATACCGCGAGACCCACGCTCACCGGCTCCAGATTTATCAGCAATAAACCAGCCAGCCG |
| | | GAAGGGCCGAGCGCAGAAGTGGTCCTGCAACTTTATCCGCCTCCATCCAGTCTATTAATT |
| | | GTTGCCGGGAAGCTAGAGTAAGTAGTTCGCCAGTTAATAGTTTGCGCAACGTTGTTGCCA |
| | | TTGCTACAGGCATCGTGGTGTCACGCTCGTCGTTTGGTATGGCTTCATTCAGCTCCGGTT |
| | | CCCAACGATCAAGGCGAGTTACATGATCCCCCATGTTGTGCAAAAAAGCGGTTAGCTCCT |
| | | TCGGTCCTCCGATCGTTGTCAGAAGTAAGTTGGCCGCAGTGTTATCACTCATGGTTATGG |
| | | CAGCACTGCATAATTCTCTTACTGTCATGCCATCCGTAAGATGCTTTTCTGTGACTGGTG |
| | | AGTACTCAACCAAGTCATTCTGAGAATAGTGTATGCGGCGACCGAGTTGCTCTTGCCCGG |
| | | CGTCAATACGGGATAATACCGCGCCACATAGCAGAACTTTAAAAGTGCTCATCATTGGAA |
| | | AACGTTCTTCGGGGCGAAAACTCTCAAGGATCTTACCGCTGTTGAGATCCAGTTCGATGT |
| | | AACCCACTCGTGCACCCAACTGATCTTCAGCATCTTTTACTTTCACCAGCGTTTCTGGGT |
| | | GAGCAAAAACAGGAAGGCAAAATGCCGCAAAAAAGGGAATAAGGGCGACACGGAAATGTT |
| | | GAATACTCATACTCTTCCTTTTTCAATATTATTGAAGCATTTATCAGGGTTATTGTCTCA |
| | | TGAGCGGATACATATTTGAATGTATTTAGAAAAATAAACAAATAGGGGTTCCGCGCACAT |
| | | TTCCCCGAAAAGTGCCACCTGA |
| 1239 | Plasmid for | CGTCGATCGACGGATCGGGAGATCTCCCGATCCCCTATGGTGCACTCTCAGTACAATCTG |
| | fusion protein | CTCTGATGCCGCATAGTTAAGCCAGTATCTGCTCCCTGCTTGTGTGTTGGAGGTCGCTGA |
| | with mRNA0004 | GTAGTGCGCGAGCAAAATTTAAGCTACAACAAGGCAAGGCTTGACCGACAATTGCATGAA |
| | | GAATCTGCTTAGGGTTAGGCGTTTTGCGCTGCTTCGCGATGTACGGGCCAGATATACGCG |
| | | TTGACATTGATTATTGACTAGTTATTAATAGTAATCAATTACGGGGTCATTAGTTCATAG |
| | | CCCATATATGGAGTTCCGCGTTACATAACTTACGGTAAATGGCCCGCCTGGCTGACCGCC |
| | | CAACGACCCCCGCCCATTGACGTCAATAATGACGTATGTTCCCATAGTAACGCCAATAGG |
| | | GACTTTCCATTGACGTCAATGGGTGGAGTATTTACGGTAAACTGCCCACTTGGCAGTACA |
| | | TCAAGTGTATCATATGCCAAGTACGCCCCCTATTGACGTCAATGACGGTAAATGGCCCGC |
| | | CTGGCATTATGCCCAGTACATGACCTTATGGGACTTTCCTACTTGGCAGTACATCTACGT |
| | | ATTAGTCATCGCTATTACCATGGTGATGCGGTTTTGGCAGTACATCAATGGGCGTGGATA |
| | | GCGGTTTGACTCACGGGGATTTCCAAGTCTCCACCCCATTGACGTCAATGGGAGTTTGTT |
| | | TTGGCACCAAAATCAACGGGACTTTCCAAAATGTCGTAACAACTCCGCCCCATTGACGCA |
| | | AATGGGCGGTAGGCGTGTACGGTGGGAGGTCTATATAAGCAGAGCTCTCTGGCTAACTAG |
| | | AGAACCCACTGCTTACTGGCTTATCGAAATTAATACGACTCACTATAAGGAGACCCAAGC |
| | | TACCGGTGCCACCATGTACCCATACGATGTTCCAGATTACGCTTCGCCGAAGAAAAAGCG |
| | | CAAGGTCAATCACGATCAGGAGTTCGACCCCCCTAAGGTGTACCCACCAGTGCCTGCAGA |
| | | GAAGAGGAAGCCAATCCGGGTGCTGAGCCTGTTTGATGGCATCGCCACCGGCCTGCTGGT |
| | | GCTGAAGGATCTGGGCATCCAGGTGGACCGGTACATCGCCTCCGAGGTGTGCGAGGATTC |
| | | TATCACCGTGGGCATGGTGCGCCACCAGGGCAAGATCATGTATGTGGGCGACGTGCGGTC |
| | | CGTGACACAGAAGCACATCCAGGAGTGGGGCCCATTCGATCTGGTGATCGGCGGCAGCCC |
| | | CTGTAATGACCTGTCCATCGTGAACCCTGCAAGGAAGGGACTGTACGAGGGAACCGGCCG |
| | | GCTGTTCTTTGAGTTTTATAGACTGCTGCACGACGCCAGGCCTAAGGAGGGCGACGATAG |
| | | ACCATTCTTTTGGCTGTTCGAGAATGTGGTGGCTATGGGCGTGAGCGATAAGAGGGACAT |
| | | CTCCAGGTTTCTGGAGTCTAACCCCGTGATGATCGATGCAAAGGAGGTGTCCGCCGCACA |
| | | CAGAGCCAGGTATTTCTGGGGCAATCTGCCAGGAATGAACAGGCCACTGGCAAGCACCGT |
| | | GAATGACAAGCTGGAGCTGCAGGAGTGCCTGGAGCACGGAAGGATCGCCAAGTTTTCCAA |
| | | GGTGCGCACAATCACCACACGGAGCAATTCCATCAAGCAGGGCAAGGATCAGCACTTCCC |
| | | CGTGTTCATGAACGAGAAGGAGGACATCCTGTGGTGTACCGAGATGGAGAGAGTGTTCGG |
| | | CTTTCCAGTGCACTACACAGACGTGTCTAACATGAGCAGGCTGGCAAGGCAGCGGCTGCT |
| | | GGGCAGATCTTGGAGCGTGCCCGTGATCAGGCACCTGTTCGCCCCTCTGAAGGAGTATTT |
| | | TGCCTGCGTGAGCAGCGGCAACTCCAATGCCAACAGCCGGGGCCCCTCTTTCAGCTCCGG |
| | | ATTGGTGCCTCTGAGCCTGAGGGGCTCCCACATGGCAGCAATCCCCGCCCTGGACCCCGA |
| | | GGCCGAGCCTAGCATGGACGTGATCCTGGTGGGCTCTAGCGAGCTGTCCTCTAGCGTGTC |
| | | TCCAGGAACCGGAAGGGATCTGATCGCATACGAGGTGAAGGCCAATCAGCGGAACATCGA |
| | | GGACATCTGTATCTGCTGTGGCAGCCTGCAGGTGCACACACAGCACCCACTGTTCGAGGG |
| | | AGGAATCTGCGCACCCTGTAAGGATAAGTTCCTGGACGCCCTGTTTCTGTACGACGATGA |
| | | CGGCTACCAGTCCTATTGCTCTATCTGCTGTTCCGGCGAGACCCTGCTGATCTGCGGCAA |
| | | TCCAGATTGTACAAGGTGCTATTGTTTTGAGTGCGTGGACTCTCTGGTGGGACCAGGCAC |
| | | CAGCGGAAAGGTGCACGCCATGTCCAACTGGGTGTGCTACCTGTGCCTGCCATCCTCTCG |
| | | CAGCGGACTGCTGCAGCGGAGAAGGAAGTGGAGATCCCAGCTGAAGGCCTTCTATGATAG |
| | | GGAGTCTGAGAACCCCCTGGAGATGTTTGAGACCGTGCCAGTGTGGCGCCGGCAGCCCGT |
| | | GAGGGTGCTGAGCCTGTTCGAGGATATCAAGAAGGAGCTGACATCCCTGGGCTTTCTGGA |
| | | GTCCGGCTCTGACCCCGGACAGCTGAAGCACGTGGTGGATGTGACCGACACAGTGCGGAA |
| | | GGATGTGGAGGAGTGGGGCCCTTTCGACCTGGTGTACGGAGCAACCCCTCCACTGGGACA |
| | | CACATGCGACAGACCCCCTTCTTGGTACCTGTTCCAGTTTCACCGCCTGCTGCAGTATGC |
| | | AAGGCCAAAGCCAGGCAGCCCTAGACCATTCTTTTGGATGTTCGTGGATAATCTGGTGCT |
| | | GAACAAGGAGGATCTGGACGTGGCCAGCAGGTTTCTGGAGATGGAGCCAGTGACCATCCC |
| | | AGACGTGCACGGCGGCTCCCTGCAGAATGCCGTGCGCGTGTGGTCTAACATCCCTGCCAT |
| | | CAGAAGCAGGCACTGGGCACTGGTGAGCGAGGAGGAGCTGTCCCTGCTGGCCCAGAATAA |
| | | GCAGAGCAGCAAGCTGGCCGCCAAGTGGCCTACAAAGCTGGTGAAGAACTGCTTCCTGCC |
| | | ACTGCGGGAGTACTTCAAGTATTTTTCCACCGAGCTGACATCTAGCCTGGGAGGACCCTC |
| | | CTCTGGCGCCCCACCACCTAGCGGCGGCTCCCCTGCCGGCTCTCCAACCAGCACAGAGGA |
| | | GGGCACCAGCGAGTCCGCCACACCAGAGTCTGGACCTGGCACCAGCACAGAGCCATCCGA |
| | | GGGCTCTGCCCCAGGCTCTCCTGCAGGCAGCCCTACCTCCACCGAAGAGGGCACCAGCAC |
| | | AGAGCCTTCTGAGGGCAGCGCCCCAGGCACCTCTACAGAGCCAAGCGAGCTCGAGTCCCG |
| | | GCCAGGGGAACGGCCCTTCCAGTGTCGGATCTGCATGAGAAACTTTTCACGACGCCACAT |
| | | TTTGGACAGACATACTCGGACCCACACTGGAGAGAAACCCTTTCAGTGCAGGATATGTAT |
| | | GCGGAATTTTTCCCGCCAGGACAACTTGGGGCGGCATCTGCGCACACATACCGGGAGTCA |
| | | GAAGCCTTTCCAATGCCGGATTTGCATGAGGAACTTCTCCCAATCTACCACTCTTAAACG |
| | | ACACTTGCGCACACATACAGGCGAGAAGCCATTCCAGTGTAGGATCTGCATGCGCAATTT |
| | | TAGCCGCCGGGACGGCCTGGCAGGGCACCTTAAGACGCATACAGGTAGTCAGAAGCCTTT |
| | | TCAGTGCAGGATCTGCATGAGGAATTTTAGTGTTCATCATAACCTCGTTAGGCATCTGAG |
| | | AACGCATACTGGAGAGAAGCCCTTTCAGTGTAGGATTTGTATGCGGAACTTCAGCATCAG |
| | | TCACAATTTGGCGCGGCACCTTAAGACTCATTTGCGCGGGTCTAGCCCCAAGAAGAAGAG |
| | | AAAGGTGGGAGTCGACGGATCCAGCGGCTCCGAGACCCCAGGCACATCTGAGAGCGCCAC |
| | | CCCTGAGTCCCGGACCCTGGTGACATTCAAGGACGTGTTCGTGGACTTCACCCGGGAGGA |
| | | GTGGAAGCTGCTGGACACAGCCCAGCAGATCGTGTACAGGAACGTGATGCTGGAGAACTA |
| | | TAAGAATCTGGTGTCTCTGGGCTACCAGCTGACAAAGCCAGATGTGATCCTGCGGCTGGA |
| | | GAAGGGAGAGGAGCCCTGGCTGGTGTAGTCTAGAAATCAACCTCTGGATTACAAAATTTG |
| | | TGAAAGATTGACTGGTATTCTTAACTATGTTGCTCCTTTTACGCTATGTGGATACGCTGC |
| | | TTTAATGCCTTTGTATCATGCTATTGCTTCCCGTATGGCTTTCATTTTCTCCTCCTTGTA |
| | | TAAATCCTGGTTGCTGTCTCTTTATGAGGAGTTGTGGCCCGTTGTCAGGCAACGTGGCGT |
| | | GGTGTGCACTGTGTTTGCTGACGCAACCCCCACTGGTTGGGGCATTGCCACCACCTGTCA |
| | | GCTCCTTTCCGGGACTTTCGCTTTCCCCCTCCCTATTGCCACGGCGGAACTCATCGCCGC |
| | | CTGCCTTGCCCGCTGCTGGACAGGGGCTCGGCTGTTGGGCACTGACAATTCCGTGGTGTT |
| | | GTCGGGGAAATCATCGTCCTTTCCTTGGCTGCTCGCCTGTGTTGCCACCTGGATTCTGCG |
| | | CGGGACGTCCTTCTGCTACGTCCCTTCGGCCCTCAATCCAGCGGACCTTCCTTCCCGCGG |
| | | CCTGCTGCCGGCTCTGCGGCCTCTTCCGCGTCTTCGCCTTCGCCCTCAGACGAGTCGGAT |
| | | CTCCCTTTGGGCCGCCTCCCCGCCTGTTAATTAAAAAAAAAAAAAAAAAAAAAAAAAAAA |
| | | AAAAAAAAAAAAAAAAAAAAAAAACTAGTGGCGCCTGATGCGGTATTTTCTCCTTACGCA |
| | | TCTGTGCGGTATTTCACACCGCATAATCCAGCACAGTGGCGGCCCGTTTAAACCCGCTGA |
| | | TCAGCCTCGACTGTGCCTTCTAGTTGCCAGCCATCTGTTGTTTGCCCCTCCCCCGTGCCT |
| | | TCCTTGACCCTGGAAGGTGCCACTCCCACTGTCCTTTCCTAATAAAATGAGGAAATTGCA |
| | | TCGCATTGTCTGAGTAGGTGTCATTCTATTCTGGGGGGTGGGGTGGGGCAGGACAGCAAG |
| | | GGGGAGGATTGGGAAGACAATAGCAGGCATGCTGGGGATGCGGTGGGCTCTATGGCTTCT |
| | | GAGGCGGAAAGAACCAGCTGCATTAATGAATCGGCCAACGCGCGGGGAGAGGCGGTTTGC |
| | | GTATTGGGCGCTCTTCCGCTTCCTCGCTCACTGACTCGCTGCGCTCGGTCGTTCGGCTGC |
| | | GGCGAGCGGTATCAGCTCACTCAAAGGCGGTAATACGGTTATCCACAGAATCAGGGGATA |
| | | ACGCAGGAAAGAACATGTGAGCAAAAGGCCAGCAAAAGGCCAGGAACCGTAAAAAGGCCG |
| | | CGTTGCTGGCGTTTTTCCATAGGCTCCGCCCCCCTGACGAGCATCACAAAAATCGACGCT |
| | | CAAGTCAGAGGTGGCGAAACCCGACAGGACTATAAAGATACCAGGCGTTTCCCCCTGGAA |
| | | GCTCCCTCGTGCGCTCTCCTGTTCCGACCCTGCCGCTTACCGGATACCTGTCCGCCTTTC |
| | | TCCCTTCGGGAAGCGTGGCGCTTTCTCATAGCTCACGCTGTAGGTATCTCAGTTCGGTGT |
| | | AGGTCGTTCGCTCCAAGCTGGGCTGTGTGCACGAACCCCCCGTTCAGCCCGACCGCTGCG |
| | | CCTTATCCGGTAACTATCGTCTTGAGTCCAACCCGGTAAGACACGACTTATCGCCACTGG |
| | | CAGCAGCCACTGGTAACAGGATTAGCAGAGCGAGGTATGTAGGCGGTGCTACAGAGTTCT |
| | | TGAAGTGGTGGCCTAACTACGGCTACACTAGAAGAACAGTATTTGGTATCTGCGCTCTGC |
| | | TGAAGCCAGTTACCTTCGGAAAAAGAGTTGGTAGCTCTTGATCCGGCAAACAAACCACCG |
| | | CTGGTAGCGGTTTTTTTGTTTGCAAGCAGCAGATTACGCGCAGAAAAAAAGGATCTCAAG |
| | | AAGATCCTTTGATCTTTTCTACGGGGTCTGACGCTCAGTGGAACGAAAACTCACGTTAAG |
| | | GGATTTTGGTCATGAGATTATCAAAAAGGATCTTCACCTAGATCCTTTTAAATTAAAAAT |
| | | GAAGTTTTAAATCAATCTAAAGTATATATGAGTAAACTTGGTCTGACAGTTACCAATGCT |
| | | TAATCAGTGAGGCACCTATCTCAGCGATCTGTCTATTTCGTTCATCCATAGTTGCCTGAC |
| | | TCCCCGTCGTGTAGATAACTACGATACGGGAGGGCTTACCATCTGGCCCCAGTGCTGCAA |
| | | TGATACCGCGAGACCCACGCTCACCGGCTCCAGATTTATCAGCAATAAACCAGCCAGCCG |
| | | GAAGGGCCGAGCGCAGAAGTGGTCCTGCAACTTTATCCGCCTCCATCCAGTCTATTAATT |
| | | GTTGCCGGGAAGCTAGAGTAAGTAGTTCGCCAGTTAATAGTTTGCGCAACGTTGTTGCCA |
| | | TTGCTACAGGCATCGTGGTGTCACGCTCGTCGTTTGGTATGGCTTCATTCAGCTCCGGTT |
| | | CCCAACGATCAAGGCGAGTTACATGATCCCCCATGTTGTGCAAAAAAGCGGTTAGCTCCT |
| | | TCGGTCCTCCGATCGTTGTCAGAAGTAAGTTGGCCGCAGTGTTATCACTCATGGTTATGG |
| | | CAGCACTGCATAATTCTCTTACTGTCATGCCATCCGTAAGATGCTTTTCTGTGACTGGTG |
| | | AGTACTCAACCAAGTCATTCTGAGAATAGTGTATGCGGCGACCGAGTTGCTCTTGCCCGG |
| | | CGTCAATACGGGATAATACCGCGCCACATAGCAGAACTTTAAAAGTGCTCATCATTGGAA |
| | | AACGTTCTTCGGGGCGAAAACTCTCAAGGATCTTACCGCTGTTGAGATCCAGTTCGATGT |
| | | AACCCACTCGTGCACCCAACTGATCTTCAGCATCTTTTACTTTCACCAGCGTTTCTGGGT |
| | | GAGCAAAAACAGGAAGGCAAAATGCCGCAAAAAAGGGAATAAGGGCGACACGGAAATGTT |
| | | GAATACTCATACTCTTCCTTTTTCAATATTATTGAAGCATTTATCAGGGTTATTGTCTCA |
| | | TGAGCGGATACATATTTGAATGTATTTAGAAAAATAAACAAATAGGGGTTCCGCGCACAT |
| | | TTCCCCGAAAAGTGCCACCTGA |
| 1240 | Plasmid for | CGTCGATCGACGGATCGGGAGATCTCCCGATCCCCTATGGTGCACTCTCAGTACAATCTG |
| | fusion protein | CTCTGATGCCGCATAGTTAAGCCAGTATCTGCTCCCTGCTTGTGTGTTGGAGGTCGCTGA |
| | with mRNA0005 | GTAGTGCGCGAGCAAAATTTAAGCTACAACAAGGCAAGGCTTGACCGACAATTGCATGAA |
| | | GAATCTGCTTAGGGTTAGGCGTTTTGCGCTGCTTCGCGATGTACGGGCCAGATATACGCG |
| | | TTGACATTGATTATTGACTAGTTATTAATAGTAATCAATTACGGGGTCATTAGTTCATAG |
| | | CCCATATATGGAGTTCCGCGTTACATAACTTACGGTAAATGGCCCGCCTGGCTGACCGCC |
| | | CAACGACCCCCGCCCATTGACGTCAATAATGACGTATGTTCCCATAGTAACGCCAATAGG |
| | | GACTTTCCATTGACGTCAATGGGTGGAGTATTTACGGTAAACTGCCCACTTGGCAGTACA |
| | | TCAAGTGTATCATATGCCAAGTACGCCCCCTATTGACGTCAATGACGGTAAATGGCCCGC |
| | | CTGGCATTATGCCCAGTACATGACCTTATGGGACTTTCCTACTTGGCAGTACATCTACGT |
| | | ATTAGTCATCGCTATTACCATGGTGATGCGGTTTTGGCAGTACATCAATGGGCGTGGATA |
| | | GCGGTTTGACTCACGGGGATTTCCAAGTCTCCACCCCATTGACGTCAATGGGAGTTTGTT |
| | | TTGGCACCAAAATCAACGGGACTTTCCAAAATGTCGTAACAACTCCGCCCCATTGACGCA |
| | | AATGGGCGGTAGGCGTGTACGGTGGGAGGTCTATATAAGCAGAGCTCTCTGGCTAACTAG |
| | | AGAACCCACTGCTTACTGGCTTATCGAAATTAATACGACTCACTATAAGGAGACCCAAGC |
| | | TACCGGTGCCACCATGTACCCATACGATGTTCCAGATTACGCTTCGCCGAAGAAAAAGCG |
| | | CAAGGTCAATCACGATCAGGAGTTCGACCCCCCTAAGGTGTACCCACCAGTGCCTGCAGA |
| | | GAAGAGGAAGCCAATCCGGGTGCTGAGCCTGTTTGATGGCATCGCCACCGGCCTGCTGGT |
| | | GCTGAAGGATCTGGGCATCCAGGTGGACCGGTACATCGCCTCCGAGGTGTGCGAGGATTC |
| | | TATCACCGTGGGCATGGTGCGCCACCAGGGCAAGATCATGTATGTGGGCGACGTGCGGTC |
| | | CGTGACACAGAAGCACATCCAGGAGTGGGGCCCATTCGATCTGGTGATCGGCGGCAGCCC |
| | | CTGTAATGACCTGTCCATCGTGAACCCTGCAAGGAAGGGACTGTACGAGGGAACCGGCCG |
| | | GCTGTTCTTTGAGTTTTATAGACTGCTGCACGACGCCAGGCCTAAGGAGGGCGACGATAG |
| | | ACCATTCTTTTGGCTGTTCGAGAATGTGGTGGCTATGGGCGTGAGCGATAAGAGGGACAT |
| | | CTCCAGGTTTCTGGAGTCTAACCCCGTGATGATCGATGCAAAGGAGGTGTCCGCCGCACA |
| | | CAGAGCCAGGTATTTCTGGGGCAATCTGCCAGGAATGAACAGGCCACTGGCAAGCACCGT |
| | | GAATGACAAGCTGGAGCTGCAGGAGTGCCTGGAGCACGGAAGGATCGCCAAGTTTTCCAA |
| | | GGTGCGCACAATCACCACACGGAGCAATTCCATCAAGCAGGGCAAGGATCAGCACTTCCC |
| | | CGTGTTCATGAACGAGAAGGAGGACATCCTGTGGTGTACCGAGATGGAGAGAGTGTTCGG |
| | | CTTTCCAGTGCACTACACAGACGTGTCTAACATGAGCAGGCTGGCAAGGCAGCGGCTGCT |
| | | GGGCAGATCTTGGAGCGTGCCCGTGATCAGGCACCTGTTCGCCCCTCTGAAGGAGTATTT |
| | | TGCCTGCGTGAGCAGCGGCAACTCCAATGCCAACAGCCGGGGCCCCTCTTTCAGCTCCGG |
| | | ATTGGTGCCTCTGAGCCTGAGGGGCTCCCACATGGCAGCAATCCCCGCCCTGGACCCCGA |
| | | GGCCGAGCCTAGCATGGACGTGATCCTGGTGGGCTCTAGCGAGCTGTCCTCTAGCGTGTC |
| | | TCCAGGAACCGGAAGGGATCTGATCGCATACGAGGTGAAGGCCAATCAGCGGAACATCGA |
| | | GGACATCTGTATCTGCTGTGGCAGCCTGCAGGTGCACACACAGCACCCACTGTTCGAGGG |
| | | AGGAATCTGCGCACCCTGTAAGGATAAGTTCCTGGACGCCCTGTTTCTGTACGACGATGA |
| | | CGGCTACCAGTCCTATTGCTCTATCTGCTGTTCCGGCGAGACCCTGCTGATCTGCGGCAA |
| | | TCCAGATTGTACAAGGTGCTATTGTTTTGAGTGCGTGGACTCTCTGGTGGGACCAGGCAC |
| | | CAGCGGAAAGGTGCACGCCATGTCCAACTGGGTGTGCTACCTGTGCCTGCCATCCTCTCG |
| | | CAGCGGACTGCTGCAGCGGAGAAGGAAGTGGAGATCCCAGCTGAAGGCCTTCTATGATAG |
| | | GGAGTCTGAGAACCCCCTGGAGATGTTTGAGACCGTGCCAGTGTGGCGCCGGCAGCCCGT |
| | | GAGGGTGCTGAGCCTGTTCGAGGATATCAAGAAGGAGCTGACATCCCTGGGCTTTCTGGA |
| | | GTCCGGCTCTGACCCCGGACAGCTGAAGCACGTGGTGGATGTGACCGACACAGTGCGGAA |
| | | GGATGTGGAGGAGTGGGGCCCTTTCGACCTGGTGTACGGAGCAACCCCTCCACTGGGACA |
| | | CACATGCGACAGACCCCCTTCTTGGTACCTGTTCCAGTTTCACCGCCTGCTGCAGTATGC |
| | | AAGGCCAAAGCCAGGCAGCCCTAGACCATTCTTTTGGATGTTCGTGGATAATCTGGTGCT |
| | | GAACAAGGAGGATCTGGACGTGGCCAGCAGGTTTCTGGAGATGGAGCCAGTGACCATCCC |
| | | AGACGTGCACGGCGGCTCCCTGCAGAATGCCGTGCGCGTGTGGTCTAACATCCCTGCCAT |
| | | CAGAAGCAGGCACTGGGCACTGGTGAGCGAGGAGGAGCTGTCCCTGCTGGCCCAGAATAA |
| | | GCAGAGCAGCAAGCTGGCCGCCAAGTGGCCTACAAAGCTGGTGAAGAACTGCTTCCTGCC |
| | | ACTGCGGGAGTACTTCAAGTATTTTTCCACCGAGCTGACATCTAGCCTGGGAGGACCCTC |
| | | CTCTGGCGCCCCACCACCTAGCGGCGGCTCCCCTGCCGGCTCTCCAACCAGCACAGAGGA |
| | | GGGCACCAGCGAGTCCGCCACACCAGAGTCTGGACCTGGCACCAGCACAGAGCCATCCGA |
| | | GGGCTCTGCCCCAGGCTCTCCTGCAGGCAGCCCTACCTCCACCGAAGAGGGCACCAGCAC |
| | | AGAGCCTTCTGAGGGCAGCGCCCCAGGCACCTCTACAGAGCCAAGCGAGCTCGAGTCCCG |
| | | GCCAGGGGAACGGCCCTTCCAGTGTCGGATCTGCATGAGAAACTTTTCACGCCGGGAGGT |
| | | ATTGGAAAACCATTTGCGAACCCACACTGGAGAGAAACCCTTTCAGTGCAGGATATGTAT |
| | | GCGGAATTTTTCCCGGCGGGATAATCTCAATCGGCACTTGAAAACACATACCGGGAGTCA |
| | | GAAGCCTTTCCAATGCCGGATTTGCATGAGGAACTTCTCCCAATCCACTACCCTCAAGCG |
| | | ACATCTGCGGACACATACAGGCGAGAAGCCATTCCAGTGTAGGATCTGCATGCGCAATTT |
| | | TAGCCGAAGGGATGGGCTGGCGGGCCATCTTAAGACGCATACAGGTAGTCAGAAGCCTTT |
| | | TCAGTGCAGGATCTGCATGAGGAATTTTAGTGTCCATCACAACCTGGTCAGACACCTTAG |
| | | GACGCATACTGGAGAGAAGCCCTTTCAGTGTAGGATTTGTATGCGGAACTTCAGCATATC |
| | | ACATAACCTTGCCCGACACTTGAAGACTCATTTGCGCGGGTCTAGCCCCAAGAAGAAGAG |
| | | AAAGGTGGGAGTCGACGGATCCAGCGGCTCCGAGACCCCAGGCACATCTGAGAGCGCCAC |
| | | CCCTGAGTCCCGGACCCTGGTGACATTCAAGGACGTGTTCGTGGACTTCACCCGGGAGGA |
| | | GTGGAAGCTGCTGGACACAGCCCAGCAGATCGTGTACAGGAACGTGATGCTGGAGAACTA |
| | | TAAGAATCTGGTGTCTCTGGGCTACCAGCTGACAAAGCCAGATGTGATCCTGCGGCTGGA |
| | | GAAGGGAGAGGAGCCCTGGCTGGTGTAGTCTAGAAATCAACCTCTGGATTACAAAATTTG |
| | | TGAAAGATTGACTGGTATTCTTAACTATGTTGCTCCTTTTACGCTATGTGGATACGCTGC |
| | | TTTAATGCCTTTGTATCATGCTATTGCTTCCCGTATGGCTTTCATTTTCTCCTCCTTGTA |
| | | TAAATCCTGGTTGCTGTCTCTTTATGAGGAGTTGTGGCCCGTTGTCAGGCAACGTGGCGT |
| | | GGTGTGCACTGTGTTTGCTGACGCAACCCCCACTGGTTGGGGCATTGCCACCACCTGTCA |
| | | GCTCCTTTCCGGGACTTTCGCTTTCCCCCTCCCTATTGCCACGGCGGAACTCATCGCCGC |
| | | CTGCCTTGCCCGCTGCTGGACAGGGGCTCGGCTGTTGGGCACTGACAATTCCGTGGTGTT |
| | | GTCGGGGAAATCATCGTCCTTTCCTTGGCTGCTCGCCTGTGTTGCCACCTGGATTCTGCG |
| | | CGGGACGTCCTTCTGCTACGTCCCTTCGGCCCTCAATCCAGCGGACCTTCCTTCCCGCGG |
| | | CCTGCTGCCGGCTCTGCGGCCTCTTCCGCGTCTTCGCCTTCGCCCTCAGACGAGTCGGAT |
| | | CTCCCTTTGGGCCGCCTCCCCGCCTGTTAATTAAAAAAAAAAAAAAAAAAAAAAAAAAAA |
| | | AAAAAAAAAAAAAAAAAAAAAAAACTAGTGGCGCCTGATGCGGTATTTTCTCCTTACGCA |
| | | TCTGTGCGGTATTTCACACCGCATAATCCAGCACAGTGGCGGCCCGTTTAAACCCGCTGA |
| | | TCAGCCTCGACTGTGCCTTCTAGTTGCCAGCCATCTGTTGTTTGCCCCTCCCCCGTGCCT |
| | | TCCTTGACCCTGGAAGGTGCCACTCCCACTGTCCTTTCCTAATAAAATGAGGAAATTGCA |
| | | TCGCATTGTCTGAGTAGGTGTCATTCTATTCTGGGGGGTGGGGTGGGGCAGGACAGCAAG |
| | | GGGGAGGATTGGGAAGACAATAGCAGGCATGCTGGGGATGCGGTGGGCTCTATGGCTTCT |
| | | GAGGCGGAAAGAACCAGCTGCATTAATGAATCGGCCAACGCGCGGGGAGAGGCGGTTTGC |
| | | GTATTGGGCGCTCTTCCGCTTCCTCGCTCACTGACTCGCTGCGCTCGGTCGTTCGGCTGC |
| | | GGCGAGCGGTATCAGCTCACTCAAAGGCGGTAATACGGTTATCCACAGAATCAGGGGATA |
| | | ACGCAGGAAAGAACATGTGAGCAAAAGGCCAGCAAAAGGCCAGGAACCGTAAAAAGGCCG |
| | | CGTTGCTGGCGTTTTTCCATAGGCTCCGCCCCCCTGACGAGCATCACAAAAATCGACGCT |
| | | CAAGTCAGAGGTGGCGAAACCCGACAGGACTATAAAGATACCAGGCGTTTCCCCCTGGAA |
| | | GCTCCCTCGTGCGCTCTCCTGTTCCGACCCTGCCGCTTACCGGATACCTGTCCGCCTTTC |
| | | TCCCTTCGGGAAGCGTGGCGCTTTCTCATAGCTCACGCTGTAGGTATCTCAGTTCGGTGT |
| | | AGGTCGTTCGCTCCAAGCTGGGCTGTGTGCACGAACCCCCCGTTCAGCCCGACCGCTGCG |
| | | CCTTATCCGGTAACTATCGTCTTGAGTCCAACCCGGTAAGACACGACTTATCGCCACTGG |
| | | CAGCAGCCACTGGTAACAGGATTAGCAGAGCGAGGTATGTAGGCGGTGCTACAGAGTTCT |
| | | TGAAGTGGTGGCCTAACTACGGCTACACTAGAAGAACAGTATTTGGTATCTGCGCTCTGC |
| | | TGAAGCCAGTTACCTTCGGAAAAAGAGTTGGTAGCTCTTGATCCGGCAAACAAACCACCG |
| | | CTGGTAGCGGTTTTTTTGTTTGCAAGCAGCAGATTACGCGCAGAAAAAAAGGATCTCAAG |
| | | AAGATCCTTTGATCTTTTCTACGGGGTCTGACGCTCAGTGGAACGAAAACTCACGTTAAG |
| | | GGATTTTGGTCATGAGATTATCAAAAAGGATCTTCACCTAGATCCTTTTAAATTAAAAAT |
| | | GAAGTTTTAAATCAATCTAAAGTATATATGAGTAAACTTGGTCTGACAGTTACCAATGCT |
| | | TAATCAGTGAGGCACCTATCTCAGCGATCTGTCTATTTCGTTCATCCATAGTTGCCTGAC |
| | | TCCCCGTCGTGTAGATAACTACGATACGGGAGGGCTTACCATCTGGCCCCAGTGCTGCAA |
| | | TGATACCGCGAGACCCACGCTCACCGGCTCCAGATTTATCAGCAATAAACCAGCCAGCCG |
| | | GAAGGGCCGAGCGCAGAAGTGGTCCTGCAACTTTATCCGCCTCCATCCAGTCTATTAATT |
| | | GTTGCCGGGAAGCTAGAGTAAGTAGTTCGCCAGTTAATAGTTTGCGCAACGTTGTTGCCA |
| | | TTGCTACAGGCATCGTGGTGTCACGCTCGTCGTTTGGTATGGCTTCATTCAGCTCCGGTT |
| | | CCCAACGATCAAGGCGAGTTACATGATCCCCCATGTTGTGCAAAAAAGCGGTTAGCTCCT |
| | | TCGGTCCTCCGATCGTTGTCAGAAGTAAGTTGGCCGCAGTGTTATCACTCATGGTTATGG |
| | | CAGCACTGCATAATTCTCTTACTGTCATGCCATCCGTAAGATGCTTTTCTGTGACTGGTG |
| | | AGTACTCAACCAAGTCATTCTGAGAATAGTGTATGCGGCGACCGAGTTGCTCTTGCCCGG |
| | | CGTCAATACGGGATAATACCGCGCCACATAGCAGAACTTTAAAAGTGCTCATCATTGGAA |
| | | AACGTTCTTCGGGGCGAAAACTCTCAAGGATCTTACCGCTGTTGAGATCCAGTTCGATGT |
| | | AACCCACTCGTGCACCCAACTGATCTTCAGCATCTTTTACTTTCACCAGCGTTTCTGGGT |
| | | GAGCAAAAACAGGAAGGCAAAATGCCGCAAAAAAGGGAATAAGGGCGACACGGAAATGTT |
| | | GAATACTCATACTCTTCCTTTTTCAATATTATTGAAGCATTTATCAGGGTTATTGTCTCA |
| | | TGAGCGGATACATATTTGAATGTATTTAGAAAAATAAACAAATAGGGGTTCCGCGCACAT |
| | | TTCCCCGAAAAGTGCCACCTGA |
| 1241 | Plasmid for | CGTCGATCGACGGATCGGGAGATCTCCCGATCCCCTATGGTGCACTCTCAGTACAATCTG |
| | fusion fusion | CTCTGATGCCGCATAGTTAAGCCAGTATCTGCTCCCTGCTTGTGTGTTGGAGGTCGCTGA |
| | protein with | GTAGTGCGCGAGCAAAATTTAAGCTACAACAAGGCAAGGCTTGACCGACAATTGCATGAA |
| | mRNA0006 | GAATCTGCTTAGGGTTAGGCGTTTTGCGCTGCTTCGCGATGTACGGGCCAGATATACGCG |
| | | TTGACATTGATTATTGACTAGTTATTAATAGTAATCAATTACGGGGTCATTAGTTCATAG |
| | | CCCATATATGGAGTTCCGCGTTACATAACTTACGGTAAATGGCCCGCCTGGCTGACCGCC |
| | | CAACGACCCCCGCCCATTGACGTCAATAATGACGTATGTTCCCATAGTAACGCCAATAGG |
| | | GACTTTCCATTGACGTCAATGGGTGGAGTATTTACGGTAAACTGCCCACTTGGCAGTACA |
| | | TCAAGTGTATCATATGCCAAGTACGCCCCCTATTGACGTCAATGACGGTAAATGGCCCGC |
| | | CTGGCATTATGCCCAGTACATGACCTTATGGGACTTTCCTACTTGGCAGTACATCTACGT |
| | | ATTAGTCATCGCTATTACCATGGTGATGCGGTTTTGGCAGTACATCAATGGGCGTGGATA |
| | | GCGGTTTGACTCACGGGGATTTCCAAGTCTCCACCCCATTGACGTCAATGGGAGTTTGTT |
| | | TTGGCACCAAAATCAACGGGACTTTCCAAAATGTCGTAACAACTCCGCCCCATTGACGCA |
| | | AATGGGCGGTAGGCGTGTACGGTGGGAGGTCTATATAAGCAGAGCTCTCTGGCTAACTAG |
| | | AGAACCCACTGCTTACTGGCTTATCGAAATTAATACGACTCACTATAAGGAGACCCAAGC |
| | | TACCGGTGCCACCATGTACCCATACGATGTTCCAGATTACGCTTCGCCGAAGAAAAAGCG |
| | | CAAGGTCAATCACGATCAGGAGTTCGACCCCCCTAAGGTGTACCCACCAGTGCCTGCAGA |
| | | GAAGAGGAAGCCAATCCGGGTGCTGAGCCTGTTTGATGGCATCGCCACCGGCCTGCTGGT |
| | | GCTGAAGGATCTGGGCATCCAGGTGGACCGGTACATCGCCTCCGAGGTGTGCGAGGATTC |
| | | TATCACCGTGGGCATGGTGCGCCACCAGGGCAAGATCATGTATGTGGGCGACGTGCGGTC |
| | | CGTGACACAGAAGCACATCCAGGAGTGGGGCCCATTCGATCTGGTGATCGGCGGCAGCCC |
| | | CTGTAATGACCTGTCCATCGTGAACCCTGCAAGGAAGGGACTGTACGAGGGAACCGGCCG |
| | | GCTGTTCTTTGAGTTTTATAGACTGCTGCACGACGCCAGGCCTAAGGAGGGCGACGATAG |
| | | ACCATTCTTTTGGCTGTTCGAGAATGTGGTGGCTATGGGCGTGAGCGATAAGAGGGACAT |
| | | CTCCAGGTTTCTGGAGTCTAACCCCGTGATGATCGATGCAAAGGAGGTGTCCGCCGCACA |
| | | CAGAGCCAGGTATTTCTGGGGCAATCTGCCAGGAATGAACAGGCCACTGGCAAGCACCGT |
| | | GAATGACAAGCTGGAGCTGCAGGAGTGCCTGGAGCACGGAAGGATCGCCAAGTTTTCCAA |
| | | GGTGCGCACAATCACCACACGGAGCAATTCCATCAAGCAGGGCAAGGATCAGCACTTCCC |
| | | CGTGTTCATGAACGAGAAGGAGGACATCCTGTGGTGTACCGAGATGGAGAGAGTGTTCGG |
| | | CTTTCCAGTGCACTACACAGACGTGTCTAACATGAGCAGGCTGGCAAGGCAGCGGCTGCT |
| | | GGGCAGATCTTGGAGCGTGCCCGTGATCAGGCACCTGTTCGCCCCTCTGAAGGAGTATTT |
| | | TGCCTGCGTGAGCAGCGGCAACTCCAATGCCAACAGCCGGGGCCCCTCTTTCAGCTCCGG |
| | | ATTGGTGCCTCTGAGCCTGAGGGGCTCCCACATGGCAGCAATCCCCGCCCTGGACCCCGA |
| | | GGCCGAGCCTAGCATGGACGTGATCCTGGTGGGCTCTAGCGAGCTGTCCTCTAGCGTGTC |
| | | TCCAGGAACCGGAAGGGATCTGATCGCATACGAGGTGAAGGCCAATCAGCGGAACATCGA |
| | | GGACATCTGTATCTGCTGTGGCAGCCTGCAGGTGCACACACAGCACCCACTGTTCGAGGG |
| | | AGGAATCTGCGCACCCTGTAAGGATAAGTTCCTGGACGCCCTGTTTCTGTACGACGATGA |
| | | CGGCTACCAGTCCTATTGCTCTATCTGCTGTTCCGGCGAGACCCTGCTGATCTGCGGCAA |
| | | TCCAGATTGTACAAGGTGCTATTGTTTTGAGTGCGTGGACTCTCTGGTGGGACCAGGCAC |
| | | CAGCGGAAAGGTGCACGCCATGTCCAACTGGGTGTGCTACCTGTGCCTGCCATCCTCTCG |
| | | CAGCGGACTGCTGCAGCGGAGAAGGAAGTGGAGATCCCAGCTGAAGGCCTTCTATGATAG |
| | | GGAGTCTGAGAACCCCCTGGAGATGTTTGAGACCGTGCCAGTGTGGCGCCGGCAGCCCGT |
| | | GAGGGTGCTGAGCCTGTTCGAGGATATCAAGAAGGAGCTGACATCCCTGGGCTTTCTGGA |
| | | GTCCGGCTCTGACCCCGGACAGCTGAAGCACGTGGTGGATGTGACCGACACAGTGCGGAA |
| | | GGATGTGGAGGAGTGGGGCCCTTTCGACCTGGTGTACGGAGCAACCCCTCCACTGGGACA |
| | | CACATGCGACAGACCCCCTTCTTGGTACCTGTTCCAGTTTCACCGCCTGCTGCAGTATGC |
| | | AAGGCCAAAGCCAGGCAGCCCTAGACCATTCTTTTGGATGTTCGTGGATAATCTGGTGCT |
| | | GAACAAGGAGGATCTGGACGTGGCCAGCAGGTTTCTGGAGATGGAGCCAGTGACCATCCC |
| | | AGACGTGCACGGCGGCTCCCTGCAGAATGCCGTGCGCGTGTGGTCTAACATCCCTGCCAT |
| | | CAGAAGCAGGCACTGGGCACTGGTGAGCGAGGAGGAGCTGTCCCTGCTGGCCCAGAATAA |
| | | GCAGAGCAGCAAGCTGGCCGCCAAGTGGCCTACAAAGCTGGTGAAGAACTGCTTCCTGCC |
| | | ACTGCGGGAGTACTTCAAGTATTTTTCCACCGAGCTGACATCTAGCCTGGGAGGACCCTC |
| | | CTCTGGCGCCCCACCACCTAGCGGCGGCTCCCCTGCCGGCTCTCCAACCAGCACAGAGGA |
| | | GGGCACCAGCGAGTCCGCCACACCAGAGTCTGGACCTGGCACCAGCACAGAGCCATCCGA |
| | | GGGCTCTGCCCCAGGCTCTCCTGCAGGCAGCCCTACCTCCACCGAAGAGGGCACCAGCAC |
| | | AGAGCCTTCTGAGGGCAGCGCCCCAGGCACCTCTACAGAGCCAAGCGAGCTCGAGTCCCG |
| | | GCCAGGGGAACGGCCCTTCCAGTGTCGGATCTGCATGAGAAACTTTTCACGCAGGGCAGT |
| | | GTTGGATAGACATACCCGGACCCACACTGGAGAGAAACCCTTTCAGTGCAGGATATGTAT |
| | | GCGGAATTTTTCCCGACAAGATAATCTGGGGAGGCATCTGCGGACACATACCGGGAGTCA |
| | | GAAGCCTTTCCAATGCCGGATTTGCATGAGGAACTTCTCCCAATCAACTACCCTGAAGCG |
| | | ACATCTGCGCACACATACAGGCGAGAAGCCATTCCAGTGTAGGATCTGCATGCGCAATTT |
| | | TAGCCGCCGCGATGGGCTGGCTGGACACCTGAAGACGCATACAGGTAGTCAGAAGCCTTT |
| | | TCAGTGCAGGATCTGCATGAGGAATTTTAGTGTTCATCACAACTTGGTCCGACACCTTCG |
| | | GACGCATACTGGAGAGAAGCCCTTTCAGTGTAGGATTTGTATGCGGAACTTCAGCATTTC |
| | | ACACAACCTCGCGCGCCACTTGAAAACTCATTTGCGCGGGTCTAGCCCCAAGAAGAAGAG |
| | | AAAGGTGGGAGTCGACGGATCCAGCGGCTCCGAGACCCCAGGCACATCTGAGAGCGCCAC |
| | | CCCTGAGTCCCGGACCCTGGTGACATTCAAGGACGTGTTCGTGGACTTCACCCGGGAGGA |
| | | GTGGAAGCTGCTGGACACAGCCCAGCAGATCGTGTACAGGAACGTGATGCTGGAGAACTA |
| | | TAAGAATCTGGTGTCTCTGGGCTACCAGCTGACAAAGCCAGATGTGATCCTGCGGCTGGA |
| | | GAAGGGAGAGGAGCCCTGGCTGGTGTAGTCTAGAAATCAACCTCTGGATTACAAAATTTG |
| | | TGAAAGATTGACTGGTATTCTTAACTATGTTGCTCCTTTTACGCTATGTGGATACGCTGC |
| | | TTTAATGCCTTTGTATCATGCTATTGCTTCCCGTATGGCTTTCATTTTCTCCTCCTTGTA |
| | | TAAATCCTGGTTGCTGTCTCTTTATGAGGAGTTGTGGCCCGTTGTCAGGCAACGTGGCGT |
| | | GGTGTGCACTGTGTTTGCTGACGCAACCCCCACTGGTTGGGGCATTGCCACCACCTGTCA |
| | | GCTCCTTTCCGGGACTTTCGCTTTCCCCCTCCCTATTGCCACGGCGGAACTCATCGCCGC |
| | | CTGCCTTGCCCGCTGCTGGACAGGGGCTCGGCTGTTGGGCACTGACAATTCCGTGGTGTT |
| | | GTCGGGGAAATCATCGTCCTTTCCTTGGCTGCTCGCCTGTGTTGCCACCTGGATTCTGCG |
| | | CGGGACGTCCTTCTGCTACGTCCCTTCGGCCCTCAATCCAGCGGACCTTCCTTCCCGCGG |
| | | CCTGCTGCCGGCTCTGCGGCCTCTTCCGCGTCTTCGCCTTCGCCCTCAGACGAGTCGGAT |
| | | CTCCCTTTGGGCCGCCTCCCCGCCTGTTAATTAAAAAAAAAAAAAAAAAAAAAAAAAAAA |
| | | AAAAAAAAAAAAAAAAAAAAAAAACTAGTGGCGCCTGATGCGGTATTTTCTCCTTACGCA |
| | | TCTGTGCGGTATTTCACACCGCATAATCCAGCACAGTGGCGGCCCGTTTAAACCCGCTGA |
| | | TCAGCCTCGACTGTGCCTTCTAGTTGCCAGCCATCTGTTGTTTGCCCCTCCCCCGTGCCT |
| | | TCCTTGACCCTGGAAGGTGCCACTCCCACTGTCCTTTCCTAATAAAATGAGGAAATTGCA |
| | | TCGCATTGTCTGAGTAGGTGTCATTCTATTCTGGGGGGTGGGGTGGGGCAGGACAGCAAG |
| | | GGGGAGGATTGGGAAGACAATAGCAGGCATGCTGGGGATGCGGTGGGCTCTATGGCTTCT |
| | | GAGGCGGAAAGAACCAGCTGCATTAATGAATCGGCCAACGCGCGGGGAGAGGCGGTTTGC |
| | | GTATTGGGCGCTCTTCCGCTTCCTCGCTCACTGACTCGCTGCGCTCGGTCGTTCGGCTGC |
| | | GGCGAGCGGTATCAGCTCACTCAAAGGCGGTAATACGGTTATCCACAGAATCAGGGGATA |
| | | ACGCAGGAAAGAACATGTGAGCAAAAGGCCAGCAAAAGGCCAGGAACCGTAAAAAGGCCG |
| | | CGTTGCTGGCGTTTTTCCATAGGCTCCGCCCCCCTGACGAGCATCACAAAAATCGACGCT |
| | | CAAGTCAGAGGTGGCGAAACCCGACAGGACTATAAAGATACCAGGCGTTTCCCCCTGGAA |
| | | GCTCCCTCGTGCGCTCTCCTGTTCCGACCCTGCCGCTTACCGGATACCTGTCCGCCTTTC |
| | | TCCCTTCGGGAAGCGTGGCGCTTTCTCATAGCTCACGCTGTAGGTATCTCAGTTCGGTGT |
| | | AGGTCGTTCGCTCCAAGCTGGGCTGTGTGCACGAACCCCCCGTTCAGCCCGACCGCTGCG |
| | | CCTTATCCGGTAACTATCGTCTTGAGTCCAACCCGGTAAGACACGACTTATCGCCACTGG |
| | | CAGCAGCCACTGGTAACAGGATTAGCAGAGCGAGGTATGTAGGCGGTGCTACAGAGTTCT |
| | | TGAAGTGGTGGCCTAACTACGGCTACACTAGAAGAACAGTATTTGGTATCTGCGCTCTGC |
| | | TGAAGCCAGTTACCTTCGGAAAAAGAGTTGGTAGCTCTTGATCCGGCAAACAAACCACCG |
| | | CTGGTAGCGGTTTTTTTGTTTGCAAGCAGCAGATTACGCGCAGAAAAAAAGGATCTCAAG |
| | | AAGATCCTTTGATCTTTTCTACGGGGTCTGACGCTCAGTGGAACGAAAACTCACGTTAAG |
| | | GGATTTTGGTCATGAGATTATCAAAAAGGATCTTCACCTAGATCCTTTTAAATTAAAAAT |
| | | GAAGTTTTAAATCAATCTAAAGTATATATGAGTAAACTTGGTCTGACAGTTACCAATGCT |
| | | TAATCAGTGAGGCACCTATCTCAGCGATCTGTCTATTTCGTTCATCCATAGTTGCCTGAC |
| | | TCCCCGTCGTGTAGATAACTACGATACGGGAGGGCTTACCATCTGGCCCCAGTGCTGCAA |
| | | TGATACCGCGAGACCCACGCTCACCGGCTCCAGATTTATCAGCAATAAACCAGCCAGCCG |
| | | GAAGGGCCGAGCGCAGAAGTGGTCCTGCAACTTTATCCGCCTCCATCCAGTCTATTAATT |
| | | GTTGCCGGGAAGCTAGAGTAAGTAGTTCGCCAGTTAATAGTTTGCGCAACGTTGTTGCCA |
| | | TTGCTACAGGCATCGTGGTGTCACGCTCGTCGTTTGGTATGGCTTCATTCAGCTCCGGTT |
| | | CCCAACGATCAAGGCGAGTTACATGATCCCCCATGTTGTGCAAAAAAGCGGTTAGCTCCT |
| | | TCGGTCCTCCGATCGTTGTCAGAAGTAAGTTGGCCGCAGTGTTATCACTCATGGTTATGG |
| | | CAGCACTGCATAATTCTCTTACTGTCATGCCATCCGTAAGATGCTTTTCTGTGACTGGTG |
| | | AGTACTCAACCAAGTCATTCTGAGAATAGTGTATGCGGCGACCGAGTTGCTCTTGCCCGG |
| | | CGTCAATACGGGATAATACCGCGCCACATAGCAGAACTTTAAAAGTGCTCATCATTGGAA |
| | | AACGTTCTTCGGGGCGAAAACTCTCAAGGATCTTACCGCTGTTGAGATCCAGTTCGATGT |
| | | AACCCACTCGTGCACCCAACTGATCTTCAGCATCTTTTACTTTCACCAGCGTTTCTGGGT |
| | | GAGCAAAAACAGGAAGGCAAAATGCCGCAAAAAAGGGAATAAGGGCGACACGGAAATGTT |
| | | GAATACTCATACTCTTCCTTTTTCAATATTATTGAAGCATTTATCAGGGTTATTGTCTCA |
| | | TGAGCGGATACATATTTGAATGTATTTAGAAAAATAAACAAATAGGGGTTCCGCGCACAT |
| | | TTCCCCGAAAAGTGCCACCTGA |
| 1242 | Plasmid for | CGTCGATCGACGGATCGGGAGATCTCCCGATCCCCTATGGTGCACTCTCAGTACAATCTG |
| | fusion protein | CTCTGATGCCGCATAGTTAAGCCAGTATCTGCTCCCTGCTTGTGTGTTGGAGGTCGCTGA |
| | with mRNA0021 | GTAGTGCGCGAGCAAAATTTAAGCTACAACAAGGCAAGGCTTGACCGACAATTGCATGAA |
| | | GAATCTGCTTAGGGTTAGGCGTTTTGCGCTGCTTCGCGATGTACGGGCCAGATATACGCG |
| | | TTGACATTGATTATTGACTAGTTATTAATAGTAATCAATTACGGGGTCATTAGTTCATAG |
| | | CCCATATATGGAGTTCCGCGTTACATAACTTACGGTAAATGGCCCGCCTGGCTGACCGCC |
| | | CAACGACCCCCGCCCATTGACGTCAATAATGACGTATGTTCCCATAGTAACGCCAATAGG |
| | | GACTTTCCATTGACGTCAATGGGTGGAGTATTTACGGTAAACTGCCCACTTGGCAGTACA |
| | | TCAAGTGTATCATATGCCAAGTACGCCCCCTATTGACGTCAATGACGGTAAATGGCCCGC |
| | | CTGGCATTATGCCCAGTACATGACCTTATGGGACTTTCCTACTTGGCAGTACATCTACGT |
| | | ATTAGTCATCGCTATTACCATGGTGATGCGGTTTTGGCAGTACATCAATGGGCGTGGATA |
| | | GCGGTTTGACTCACGGGGATTTCCAAGTCTCCACCCCATTGACGTCAATGGGAGTTTGTT |
| | | TTGGCACCAAAATCAACGGGACTTTCCAAAATGTCGTAACAACTCCGCCCCATTGACGCA |
| | | AATGGGCGGTAGGCGTGTACGGTGGGAGGTCTATATAAGCAGAGCTCTCTGGCTAACTAG |
| | | AGAACCCACTGCTTACTGGCTTATCGAAATTAATACGACTCACTATAAGGAGACCCAAGC |
| | | TACCGGTGCCACCATGTACCCATACGATGTTCCAGATTACGCTTCGCCGAAGAAAAAGCG |
| | | CAAGGTCAATCACGATCAGGAGTTCGACCCCCCTAAGGTGTACCCACCAGTGCCTGCAGA |
| | | GAAGAGGAAGCCAATCCGGGTGCTGAGCCTGTTTGATGGCATCGCCACCGGCCTGCTGGT |
| | | GCTGAAGGATCTGGGCATCCAGGTGGACCGGTACATCGCCTCCGAGGTGTGCGAGGATTC |
| | | TATCACCGTGGGCATGGTGCGCCACCAGGGCAAGATCATGTATGTGGGCGACGTGCGGTC |
| | | CGTGACACAGAAGCACATCCAGGAGTGGGGCCCATTCGATCTGGTGATCGGCGGCAGCCC |
| | | CTGTAATGACCTGTCCATCGTGAACCCTGCAAGGAAGGGACTGTACGAGGGAACCGGCCG |
| | | GCTGTTCTTTGAGTTTTATAGACTGCTGCACGACGCCAGGCCTAAGGAGGGCGACGATAG |
| | | ACCATTCTTTTGGCTGTTCGAGAATGTGGTGGCTATGGGCGTGAGCGATAAGAGGGACAT |
| | | CTCCAGGTTTCTGGAGTCTAACCCCGTGATGATCGATGCAAAGGAGGTGTCCGCCGCACA |
| | | CAGAGCCAGGTATTTCTGGGGCAATCTGCCAGGAATGAACAGGCCACTGGCAAGCACCGT |
| | | GAATGACAAGCTGGAGCTGCAGGAGTGCCTGGAGCACGGAAGGATCGCCAAGTTTTCCAA |
| | | GGTGCGCACAATCACCACACGGAGCAATTCCATCAAGCAGGGCAAGGATCAGCACTTCCC |
| | | CGTGTTCATGAACGAGAAGGAGGACATCCTGTGGTGTACCGAGATGGAGAGAGTGTTCGG |
| | | CTTTCCAGTGCACTACACAGACGTGTCTAACATGAGCAGGCTGGCAAGGCAGCGGCTGCT |
| | | GGGCAGATCTTGGAGCGTGCCCGTGATCAGGCACCTGTTCGCCCCTCTGAAGGAGTATTT |
| | | TGCCTGCGTGAGCAGCGGCAACTCCAATGCCAACAGCCGGGGCCCCTCTTTCAGCTCCGG |
| | | ATTGGTGCCTCTGAGCCTGAGGGGCTCCCACATGGCAGCAATCCCCGCCCTGGACCCCGA |
| | | GGCCGAGCCTAGCATGGACGTGATCCTGGTGGGCTCTAGCGAGCTGTCCTCTAGCGTGTC |
| | | TCCAGGAACCGGAAGGGATCTGATCGCATACGAGGTGAAGGCCAATCAGCGGAACATCGA |
| | | GGACATCTGTATCTGCTGTGGCAGCCTGCAGGTGCACACACAGCACCCACTGTTCGAGGG |
| | | AGGAATCTGCGCACCCTGTAAGGATAAGTTCCTGGACGCCCTGTTTCTGTACGACGATGA |
| | | CGGCTACCAGTCCTATTGCTCTATCTGCTGTTCCGGCGAGACCCTGCTGATCTGCGGCAA |
| | | TCCAGATTGTACAAGGTGCTATTGTTTTGAGTGCGTGGACTCTCTGGTGGGACCAGGCAC |
| | | CAGCGGAAAGGTGCACGCCATGTCCAACTGGGTGTGCTACCTGTGCCTGCCATCCTCTCG |
| | | CAGCGGACTGCTGCAGCGGAGAAGGAAGTGGAGATCCCAGCTGAAGGCCTTCTATGATAG |
| | | GGAGTCTGAGAACCCCCTGGAGATGTTTGAGACCGTGCCAGTGTGGCGCCGGCAGCCCGT |
| | | GAGGGTGCTGAGCCTGTTCGAGGATATCAAGAAGGAGCTGACATCCCTGGGCTTTCTGGA |
| | | GTCCGGCTCTGACCCCGGACAGCTGAAGCACGTGGTGGATGTGACCGACACAGTGCGGAA |
| | | GGATGTGGAGGAGTGGGGCCCTTTCGACCTGGTGTACGGAGCAACCCCTCCACTGGGACA |
| | | CACATGCGACAGACCCCCTTCTTGGTACCTGTTCCAGTTTCACCGCCTGCTGCAGTATGC |
| | | AAGGCCAAAGCCAGGCAGCCCTAGACCATTCTTTTGGATGTTCGTGGATAATCTGGTGCT |
| | | GAACAAGGAGGATCTGGACGTGGCCAGCAGGTTTCTGGAGATGGAGCCAGTGACCATCCC |
| | | AGACGTGCACGGCGGCTCCCTGCAGAATGCCGTGCGCGTGTGGTCTAACATCCCTGCCAT |
| | | CAGAAGCAGGCACTGGGCACTGGTGAGCGAGGAGGAGCTGTCCCTGCTGGCCCAGAATAA |
| | | GCAGAGCAGCAAGCTGGCCGCCAAGTGGCCTACAAAGCTGGTGAAGAACTGCTTCCTGCC |
| | | ACTGCGGGAGTACTTCAAGTATTTTTCCACCGAGCTGACATCTAGCCTGGGAGGACCCTC |
| | | CTCTGGCGCCCCACCACCTAGCGGCGGCTCCCCTGCCGGCTCTCCAACCAGCACAGAGGA |
| | | GGGCACCAGCGAGTCCGCCACACCAGAGTCTGGACCTGGCACCAGCACAGAGCCATCCGA |
| | | GGGCTCTGCCCCAGGCTCTCCTGCAGGCAGCCCTACCTCCACCGAAGAGGGCACCAGCAC |
| | | AGAGCCTTCTGAGGGCAGCGCCCCAGGCACCTCTACAGAGCCAAGCGAGCTCGAGTCCCG |
| | | GCCAGGGGAACGGCCCTTCCAGTGTCGGATCTGCATGAGAAACTTTTCAAGAGCAGATAA |
| | | TCTGGGTCGGCACCTCCGCACCCACACTGGAGAGAAACCCTTTCAGTGCAGGATATGTAT |
| | | GCGGAATTTTTCCCGCAACACGCATCTCAGTTATCACCTTAAAACACATACCGGGAGTCA |
| | | GAAGCCTTTCCAATGCCGGATTTGCATGAGGAACTTCTCCAGGGGCGACGGCTTGAGGCG |
| | | GCATCTTCGCACACATACAGGCGAGAAGCCATTCCAGTGTAGGATCTGCATGCGCAATTT |
| | | TAGCCGCAGAGACAATTTGAACAGACATCTCAAAACGCATACAGGTAGTCAGAAGCCTTT |
| | | TCAGTGCAGGATCTGCATGAGGAATTTTAGTCGAGCAAGAAACTTGACGCTGCACACCCG |
| | | GACGCATACTGGAGAGAAGCCCTTTCAGTGTAGGATTTGTATGCGGAACTTCAGCGACCC |
| | | TTCATCTTTGAAGCGCCATCTTCGCACTCATTTGCGCGGGTCTAGCCCCAAGAAGAAGAG |
| | | AAAGGTGGGAGTCGACGGATCCAGCGGCTCCGAGACCCCAGGCACATCTGAGAGCGCCAC |
| | | CCCTGAGTCCCGGACCCTGGTGACATTCAAGGACGTGTTCGTGGACTTCACCCGGGAGGA |
| | | GTGGAAGCTGCTGGACACAGCCCAGCAGATCGTGTACAGGAACGTGATGCTGGAGAACTA |
| | | TAAGAATCTGGTGTCTCTGGGCTACCAGCTGACAAAGCCAGATGTGATCCTGCGGCTGGA |
| | | GAAGGGAGAGGAGCCCTGGCTGGTGTAGTCTAGAAATCAACCTCTGGATTACAAAATTTG |
| | | TGAAAGATTGACTGGTATTCTTAACTATGTTGCTCCTTTTACGCTATGTGGATACGCTGC |
| | | TTTAATGCCTTTGTATCATGCTATTGCTTCCCGTATGGCTTTCATTTTCTCCTCCTTGTA |
| | | TAAATCCTGGTTGCTGTCTCTTTATGAGGAGTTGTGGCCCGTTGTCAGGCAACGTGGCGT |
| | | GGTGTGCACTGTGTTTGCTGACGCAACCCCCACTGGTTGGGGCATTGCCACCACCTGTCA |
| | | GCTCCTTTCCGGGACTTTCGCTTTCCCCCTCCCTATTGCCACGGCGGAACTCATCGCCGC |
| | | CTGCCTTGCCCGCTGCTGGACAGGGGCTCGGCTGTTGGGCACTGACAATTCCGTGGTGTT |
| | | GTCGGGGAAATCATCGTCCTTTCCTTGGCTGCTCGCCTGTGTTGCCACCTGGATTCTGCG |
| | | CGGGACGTCCTTCTGCTACGTCCCTTCGGCCCTCAATCCAGCGGACCTTCCTTCCCGCGG |
| | | CCTGCTGCCGGCTCTGCGGCCTCTTCCGCGTCTTCGCCTTCGCCCTCAGACGAGTCGGAT |
| | | CTCCCTTTGGGCCGCCTCCCCGCCTGTTAATTAAAAAAAAAAAAAAAAAAAAAAAAAAAA |
| | | AAAAAAAAAAAAAAAAAAAAAAAACTAGTGGCGCCTGATGCGGTATTTTCTCCTTACGCA |
| | | TCTGTGCGGTATTTCACACCGCATAATCCAGCACAGTGGCGGCCCGTTTAAACCCGCTGA |
| | | TCAGCCTCGACTGTGCCTTCTAGTTGCCAGCCATCTGTTGTTTGCCCCTCCCCCGTGCCT |
| | | TCCTTGACCCTGGAAGGTGCCACTCCCACTGTCCTTTCCTAATAAAATGAGGAAATTGCA |
| | | TCGCATTGTCTGAGTAGGTGTCATTCTATTCTGGGGGGTGGGGTGGGGCAGGACAGCAAG |
| | | GGGGAGGATTGGGAAGACAATAGCAGGCATGCTGGGGATGCGGTGGGCTCTATGGCTTCT |
| | | GAGGCGGAAAGAACCAGCTGCATTAATGAATCGGCCAACGCGCGGGGAGAGGCGGTTTGC |
| | | GTATTGGGCGCTCTTCCGCTTCCTCGCTCACTGACTCGCTGCGCTCGGTCGTTCGGCTGC |
| | | GGCGAGCGGTATCAGCTCACTCAAAGGCGGTAATACGGTTATCCACAGAATCAGGGGATA |
| | | ACGCAGGAAAGAACATGTGAGCAAAAGGCCAGCAAAAGGCCAGGAACCGTAAAAAGGCCG |
| | | CGTTGCTGGCGTTTTTCCATAGGCTCCGCCCCCCTGACGAGCATCACAAAAATCGACGCT |
| | | CAAGTCAGAGGTGGCGAAACCCGACAGGACTATAAAGATACCAGGCGTTTCCCCCTGGAA |
| | | GCTCCCTCGTGCGCTCTCCTGTTCCGACCCTGCCGCTTACCGGATACCTGTCCGCCTTTC |
| | | TCCCTTCGGGAAGCGTGGCGCTTTCTCATAGCTCACGCTGTAGGTATCTCAGTTCGGTGT |
| | | AGGTCGTTCGCTCCAAGCTGGGCTGTGTGCACGAACCCCCCGTTCAGCCCGACCGCTGCG |
| | | CCTTATCCGGTAACTATCGTCTTGAGTCCAACCCGGTAAGACACGACTTATCGCCACTGG |
| | | CAGCAGCCACTGGTAACAGGATTAGCAGAGCGAGGTATGTAGGCGGTGCTACAGAGTTCT |
| | | TGAAGTGGTGGCCTAACTACGGCTACACTAGAAGAACAGTATTTGGTATCTGCGCTCTGC |
| | | TGAAGCCAGTTACCTTCGGAAAAAGAGTTGGTAGCTCTTGATCCGGCAAACAAACCACCG |
| | | CTGGTAGCGGTTTTTTTGTTTGCAAGCAGCAGATTACGCGCAGAAAAAAAGGATCTCAAG |
| | | AAGATCCTTTGATCTTTTCTACGGGGTCTGACGCTCAGTGGAACGAAAACTCACGTTAAG |
| | | GGATTTTGGTCATGAGATTATCAAAAAGGATCTTCACCTAGATCCTTTTAAATTAAAAAT |
| | | GAAGTTTTAAATCAATCTAAAGTATATATGAGTAAACTTGGTCTGACAGTTACCAATGCT |
| | | TAATCAGTGAGGCACCTATCTCAGCGATCTGTCTATTTCGTTCATCCATAGTTGCCTGAC |
| | | TCCCCGTCGTGTAGATAACTACGATACGGGAGGGCTTACCATCTGGCCCCAGTGCTGCAA |
| | | TGATACCGCGAGACCCACGCTCACCGGCTCCAGATTTATCAGCAATAAACCAGCCAGCCG |
| | | GAAGGGCCGAGCGCAGAAGTGGTCCTGCAACTTTATCCGCCTCCATCCAGTCTATTAATT |
| | | GTTGCCGGGAAGCTAGAGTAAGTAGTTCGCCAGTTAATAGTTTGCGCAACGTTGTTGCCA |
| | | TTGCTACAGGCATCGTGGTGTCACGCTCGTCGTTTGGTATGGCTTCATTCAGCTCCGGTT |
| | | CCCAACGATCAAGGCGAGTTACATGATCCCCCATGTTGTGCAAAAAAGCGGTTAGCTCCT |
| | | TCGGTCCTCCGATCGTTGTCAGAAGTAAGTTGGCCGCAGTGTTATCACTCATGGTTATGG |
| | | CAGCACTGCATAATTCTCTTACTGTCATGCCATCCGTAAGATGCTTTTCTGTGACTGGTG |
| | | AGTACTCAACCAAGTCATTCTGAGAATAGTGTATGCGGCGACCGAGTTGCTCTTGCCCGG |
| | | CGTCAATACGGGATAATACCGCGCCACATAGCAGAACTTTAAAAGTGCTCATCATTGGAA |
| | | AACGTTCTTCGGGGCGAAAACTCTCAAGGATCTTACCGCTGTTGAGATCCAGTTCGATGT |
| | | AACCCACTCGTGCACCCAACTGATCTTCAGCATCTTTTACTTTCACCAGCGTTTCTGGGT |
| | | GAGCAAAAACAGGAAGGCAAAATGCCGCAAAAAAGGGAATAAGGGCGACACGGAAATGTT |
| | | GAATACTCATACTCTTCCTTTTTCAATATTATTGAAGCATTTATCAGGGTTATTGTCTCA |
| | | TGAGCGGATACATATTTGAATGTATTTAGAAAAATAAACAAATAGGGGTTCCGCGCACAT |
| | | TTCCCCGAAAAGTGCCACCTGA |
| 1243 | Plasmid for | CGTCGATCGACGGATCGGGAGATCTCCCGATCCCCTATGGTGCACTCTCAGTACAATCTG |
| | fusion protein | CTCTGATGCCGCATAGTTAAGCCAGTATCTGCTCCCTGCTTGTGTGTTGGAGGTCGCTGA |
| | with mRNA0037 | GTAGTGCGCGAGCAAAATTTAAGCTACAACAAGGCAAGGCTTGACCGACAATTGCATGAA |
| | | GAATCTGCTTAGGGTTAGGCGTTTTGCGCTGCTTCGCGATGTACGGGCCAGATATACGCG |
| | | TTGACATTGATTATTGACTAGTTATTAATAGTAATCAATTACGGGGTCATTAGTTCATAG |
| | | CCCATATATGGAGTTCCGCGTTACATAACTTACGGTAAATGGCCCGCCTGGCTGACCGCC |
| | | CAACGACCCCCGCCCATTGACGTCAATAATGACGTATGTTCCCATAGTAACGCCAATAGG |
| | | GACTTTCCATTGACGTCAATGGGTGGAGTATTTACGGTAAACTGCCCACTTGGCAGTACA |
| | | TCAAGTGTATCATATGCCAAGTACGCCCCCTATTGACGTCAATGACGGTAAATGGCCCGC |
| | | CTGGCATTATGCCCAGTACATGACCTTATGGGACTTTCCTACTTGGCAGTACATCTACGT |
| | | ATTAGTCATCGCTATTACCATGGTGATGCGGTTTTGGCAGTACATCAATGGGCGTGGATA |
| | | GCGGTTTGACTCACGGGGATTTCCAAGTCTCCACCCCATTGACGTCAATGGGAGTTTGTT |
| | | TTGGCACCAAAATCAACGGGACTTTCCAAAATGTCGTAACAACTCCGCCCCATTGACGCA |
| | | AATGGGCGGTAGGCGTGTACGGTGGGAGGTCTATATAAGCAGAGCTCTCTGGCTAACTAG |
| | | AGAACCCACTGCTTACTGGCTTATCGAAATTAATACGACTCACTATAAGGAGACCCAAGC |
| | | TACCGGTGCCACCATGTACCCATACGATGTTCCAGATTACGCTTCGCCGAAGAAAAAGCG |
| | | CAAGGTCAATCACGATCAGGAGTTCGACCCCCCTAAGGTGTACCCACCAGTGCCTGCAGA |
| | | GAAGAGGAAGCCAATCCGGGTGCTGAGCCTGTTTGATGGCATCGCCACCGGCCTGCTGGT |
| | | GCTGAAGGATCTGGGCATCCAGGTGGACCGGTACATCGCCTCCGAGGTGTGCGAGGATTC |
| | | TATCACCGTGGGCATGGTGCGCCACCAGGGCAAGATCATGTATGTGGGCGACGTGCGGTC |
| | | CGTGACACAGAAGCACATCCAGGAGTGGGGCCCATTCGATCTGGTGATCGGCGGCAGCCC |
| | | CTGTAATGACCTGTCCATCGTGAACCCTGCAAGGAAGGGACTGTACGAGGGAACCGGCCG |
| | | GCTGTTCTTTGAGTTTTATAGACTGCTGCACGACGCCAGGCCTAAGGAGGGCGACGATAG |
| | | ACCATTCTTTTGGCTGTTCGAGAATGTGGTGGCTATGGGCGTGAGCGATAAGAGGGACAT |
| | | CTCCAGGTTTCTGGAGTCTAACCCCGTGATGATCGATGCAAAGGAGGTGTCCGCCGCACA |
| | | CAGAGCCAGGTATTTCTGGGGCAATCTGCCAGGAATGAACAGGCCACTGGCAAGCACCGT |
| | | GAATGACAAGCTGGAGCTGCAGGAGTGCCTGGAGCACGGAAGGATCGCCAAGTTTTCCAA |
| | | GGTGCGCACAATCACCACACGGAGCAATTCCATCAAGCAGGGCAAGGATCAGCACTTCCC |
| | | CGTGTTCATGAACGAGAAGGAGGACATCCTGTGGTGTACCGAGATGGAGAGAGTGTTCGG |
| | | CTTTCCAGTGCACTACACAGACGTGTCTAACATGAGCAGGCTGGCAAGGCAGCGGCTGCT |
| | | GGGCAGATCTTGGAGCGTGCCCGTGATCAGGCACCTGTTCGCCCCTCTGAAGGAGTATTT |
| | | TGCCTGCGTGAGCAGCGGCAACTCCAATGCCAACAGCCGGGGCCCCTCTTTCAGCTCCGG |
| | | ATTGGTGCCTCTGAGCCTGAGGGGCTCCCACATGGCAGCAATCCCCGCCCTGGACCCCGA |
| | | GGCCGAGCCTAGCATGGACGTGATCCTGGTGGGCTCTAGCGAGCTGTCCTCTAGCGTGTC |
| | | TCCAGGAACCGGAAGGGATCTGATCGCATACGAGGTGAAGGCCAATCAGCGGAACATCGA |
| | | GGACATCTGTATCTGCTGTGGCAGCCTGCAGGTGCACACACAGCACCCACTGTTCGAGGG |
| | | AGGAATCTGCGCACCCTGTAAGGATAAGTTCCTGGACGCCCTGTTTCTGTACGACGATGA |
| | | CGGCTACCAGTCCTATTGCTCTATCTGCTGTTCCGGCGAGACCCTGCTGATCTGCGGCAA |
| | | TCCAGATTGTACAAGGTGCTATTGTTTTGAGTGCGTGGACTCTCTGGTGGGACCAGGCAC |
| | | CAGCGGAAAGGTGCACGCCATGTCCAACTGGGTGTGCTACCTGTGCCTGCCATCCTCTCG |
| | | CAGCGGACTGCTGCAGCGGAGAAGGAAGTGGAGATCCCAGCTGAAGGCCTTCTATGATAG |
| | | GGAGTCTGAGAACCCCCTGGAGATGTTTGAGACCGTGCCAGTGTGGCGCCGGCAGCCCGT |
| | | GAGGGTGCTGAGCCTGTTCGAGGATATCAAGAAGGAGCTGACATCCCTGGGCTTTCTGGA |
| | | GTCCGGCTCTGACCCCGGACAGCTGAAGCACGTGGTGGATGTGACCGACACAGTGCGGAA |
| | | GGATGTGGAGGAGTGGGGCCCTTTCGACCTGGTGTACGGAGCAACCCCTCCACTGGGACA |
| | | CACATGCGACAGACCCCCTTCTTGGTACCTGTTCCAGTTTCACCGCCTGCTGCAGTATGC |
| | | AAGGCCAAAGCCAGGCAGCCCTAGACCATTCTTTTGGATGTTCGTGGATAATCTGGTGCT |
| | | GAACAAGGAGGATCTGGACGTGGCCAGCAGGTTTCTGGAGATGGAGCCAGTGACCATCCC |
| | | AGACGTGCACGGCGGCTCCCTGCAGAATGCCGTGCGCGTGTGGTCTAACATCCCTGCCAT |
| | | CAGAAGCAGGCACTGGGCACTGGTGAGCGAGGAGGAGCTGTCCCTGCTGGCCCAGAATAA |
| | | GCAGAGCAGCAAGCTGGCCGCCAAGTGGCCTACAAAGCTGGTGAAGAACTGCTTCCTGCC |
| | | ACTGCGGGAGTACTTCAAGTATTTTTCCACCGAGCTGACATCTAGCCTGGGAGGACCCTC |
| | | CTCTGGCGCCCCACCACCTAGCGGCGGCTCCCCTGCCGGCTCTCCAACCAGCACAGAGGA |
| | | GGGCACCAGCGAGTCCGCCACACCAGAGTCTGGACCTGGCACCAGCACAGAGCCATCCGA |
| | | GGGCTCTGCCCCAGGCTCTCCTGCAGGCAGCCCTACCTCCACCGAAGAGGGCACCAGCAC |
| | | AGAGCCTTCTGAGGGCAGCGCCCCAGGCACCTCTACAGAGCCAAGCGAGCTCGAGTCCCG |
| | | GCCAGGGGAACGGCCCTTCCAGTGTCGGATCTGCATGAGAAACTTTTCAAGAGTGGATCA |
| | | TCTCCATCGACACCTCCGGACCCACACTGGAGAGAAACCCTTTCAGTGCAGGATATGTAT |
| | | GCGGAATTTTTCCCGGAGGGAACATTTGTCCGGACATCTCAAGACACATACCGGGGGAGG |
| | | CGGTAGTCAGAAGCCTTTCCAATGCCGGATTTGCATGAGGAACTTCTCCCAAAGTTCCAG |
| | | CCTCGTCCGCCATCTTCGCACACATACAGGCGAGAAGCCATTCCAGTGTAGGATCTGCAT |
| | | GCGCAATTTTAGCCGCAAGGAGCGATTGGCAACCCACCTCAAGACGCATACAGGTAGTCA |
| | | GAAGCCTTTTCAGTGCAGGATCTGCATGAGGAATTTTAGTGTCGCACATAACCTCACAAG |
| | | GCATCTGCGCACGCATACTGGAGAGAAGCCCTTTCAGTGTAGGATTTGTATGCGGAACTT |
| | | CAGCATTAGTCATAACCTGGCAAGGCATCTCAAAACTCATTTGCGCGGGTCTAGCCCCAA |
| | | GAAGAAGAGAAAGGTGGGAGTCGACGGATCCAGCGGCTCCGAGACCCCAGGCACATCTGA |
| | | GAGCGCCACCCCTGAGTCCCGGACCCTGGTGACATTCAAGGACGTGTTCGTGGACTTCAC |
| | | CCGGGAGGAGTGGAAGCTGCTGGACACAGCCCAGCAGATCGTGTACAGGAACGTGATGCT |
| | | GGAGAACTATAAGAATCTGGTGTCTCTGGGCTACCAGCTGACAAAGCCAGATGTGATCCT |
| | | GCGGCTGGAGAAGGGAGAGGAGCCCTGGCTGGTGTAGTCTAGAAATCAACCTCTGGATTA |
| | | CAAAATTTGTGAAAGATTGACTGGTATTCTTAACTATGTTGCTCCTTTTACGCTATGTGG |
| | | ATACGCTGCTTTAATGCCTTTGTATCATGCTATTGCTTCCCGTATGGCTTTCATTTTCTC |
| | | CTCCTTGTATAAATCCTGGTTGCTGTCTCTTTATGAGGAGTTGTGGCCCGTTGTCAGGCA |
| | | ACGTGGCGTGGTGTGCACTGTGTTTGCTGACGCAACCCCCACTGGTTGGGGCATTGCCAC |
| | | CACCTGTCAGCTCCTTTCCGGGACTTTCGCTTTCCCCCTCCCTATTGCCACGGCGGAACT |
| | | CATCGCCGCCTGCCTTGCCCGCTGCTGGACAGGGGCTCGGCTGTTGGGCACTGACAATTC |
| | | CGTGGTGTTGTCGGGGAAATCATCGTCCTTTCCTTGGCTGCTCGCCTGTGTTGCCACCTG |
| | | GATTCTGCGCGGGACGTCCTTCTGCTACGTCCCTTCGGCCCTCAATCCAGCGGACCTTCC |
| | | TTCCCGCGGCCTGCTGCCGGCTCTGCGGCCTCTTCCGCGTCTTCGCCTTCGCCCTCAGAC |
| | | GAGTCGGATCTCCCTTTGGGCCGCCTCCCCGCCTGTTAATTAAAAAAAAAAAAAAAAAAA |
| | | AAAAAAAAAAAAAAAAAAAAAAAAAAAAAAAAACTAGTGGCGCCTGATGCGGTATTTTCT |
| | | CCTTACGCATCTGTGCGGTATTTCACACCGCATAATCCAGCACAGTGGCGGCCCGTTTAA |
| | | ACCCGCTGATCAGCCTCGACTGTGCCTTCTAGTTGCCAGCCATCTGTTGTTTGCCCCTCC |
| | | CCCGTGCCTTCCTTGACCCTGGAAGGTGCCACTCCCACTGTCCTTTCCTAATAAAATGAG |
| | | GAAATTGCATCGCATTGTCTGAGTAGGTGTCATTCTATTCTGGGGGGTGGGGTGGGGCAG |
| | | GACAGCAAGGGGGAGGATTGGGAAGACAATAGCAGGCATGCTGGGGATGCGGTGGGCTCT |
| | | ATGGCTTCTGAGGCGGAAAGAACCAGCTGCATTAATGAATCGGCCAACGCGCGGGGAGAG |
| | | GCGGTTTGCGTATTGGGCGCTCTTCCGCTTCCTCGCTCACTGACTCGCTGCGCTCGGTCG |
| | | TTCGGCTGCGGCGAGCGGTATCAGCTCACTCAAAGGCGGTAATACGGTTATCCACAGAAT |
| | | CAGGGGATAACGCAGGAAAGAACATGTGAGCAAAAGGCCAGCAAAAGGCCAGGAACCGTA |
| | | AAAAGGCCGCGTTGCTGGCGTTTTTCCATAGGCTCCGCCCCCCTGACGAGCATCACAAAA |
| | | ATCGACGCTCAAGTCAGAGGTGGCGAAACCCGACAGGACTATAAAGATACCAGGCGTTTC |
| | | CCCCTGGAAGCTCCCTCGTGCGCTCTCCTGTTCCGACCCTGCCGCTTACCGGATACCTGT |
| | | CCGCCTTTCTCCCTTCGGGAAGCGTGGCGCTTTCTCATAGCTCACGCTGTAGGTATCTCA |
| | | GTTCGGTGTAGGTCGTTCGCTCCAAGCTGGGCTGTGTGCACGAACCCCCCGTTCAGCCCG |
| | | ACCGCTGCGCCTTATCCGGTAACTATCGTCTTGAGTCCAACCCGGTAAGACACGACTTAT |
| | | CGCCACTGGCAGCAGCCACTGGTAACAGGATTAGCAGAGCGAGGTATGTAGGCGGTGCTA |
| | | CAGAGTTCTTGAAGTGGTGGCCTAACTACGGCTACACTAGAAGAACAGTATTTGGTATCT |
| | | GCGCTCTGCTGAAGCCAGTTACCTTCGGAAAAAGAGTTGGTAGCTCTTGATCCGGCAAAC |
| | | AAACCACCGCTGGTAGCGGTTTTTTTGTTTGCAAGCAGCAGATTACGCGCAGAAAAAAAG |
| | | GATCTCAAGAAGATCCTTTGATCTTTTCTACGGGGTCTGACGCTCAGTGGAACGAAAACT |
| | | CACGTTAAGGGATTTTGGTCATGAGATTATCAAAAAGGATCTTCACCTAGATCCTTTTAA |
| | | ATTAAAAATGAAGTTTTAAATCAATCTAAAGTATATATGAGTAAACTTGGTCTGACAGTT |
| | | ACCAATGCTTAATCAGTGAGGCACCTATCTCAGCGATCTGTCTATTTCGTTCATCCATAG |
| | | TTGCCTGACTCCCCGTCGTGTAGATAACTACGATACGGGAGGGCTTACCATCTGGCCCCA |
| | | GTGCTGCAATGATACCGCGAGACCCACGCTCACCGGCTCCAGATTTATCAGCAATAAACC |
| | | AGCCAGCCGGAAGGGCCGAGCGCAGAAGTGGTCCTGCAACTTTATCCGCCTCCATCCAGT |
| | | CTATTAATTGTTGCCGGGAAGCTAGAGTAAGTAGTTCGCCAGTTAATAGTTTGCGCAACG |
| | | TTGTTGCCATTGCTACAGGCATCGTGGTGTCACGCTCGTCGTTTGGTATGGCTTCATTCA |
| | | GCTCCGGTTCCCAACGATCAAGGCGAGTTACATGATCCCCCATGTTGTGCAAAAAAGCGG |
| | | TTAGCTCCTTCGGTCCTCCGATCGTTGTCAGAAGTAAGTTGGCCGCAGTGTTATCACTCA |
| | | TGGTTATGGCAGCACTGCATAATTCTCTTACTGTCATGCCATCCGTAAGATGCTTTTCTG |
| | | TGACTGGTGAGTACTCAACCAAGTCATTCTGAGAATAGTGTATGCGGCGACCGAGTTGCT |
| | | CTTGCCCGGCGTCAATACGGGATAATACCGCGCCACATAGCAGAACTTTAAAAGTGCTCA |
| | | TCATTGGAAAACGTTCTTCGGGGCGAAAACTCTCAAGGATCTTACCGCTGTTGAGATCCA |
| | | GTTCGATGTAACCCACTCGTGCACCCAACTGATCTTCAGCATCTTTTACTTTCACCAGCG |
| | | TTTCTGGGTGAGCAAAAACAGGAAGGCAAAATGCCGCAAAAAAGGGAATAAGGGCGACAC |
| | | GGAAATGTTGAATACTCATACTCTTCCTTTTTCAATATTATTGAAGCATTTATCAGGGTT |
| | | ATTGTCTCATGAGCGGATACATATTTGAATGTATTTAGAAAAATAAACAAATAGGGGTTC |
| | | CGCGCACATTTCCCCGAAAAGTGCCACCTGA |
| 1244 | Plasmid for | CGTCGATCGACGGATCGGGAGATCTCCCGATCCCCTATGGTGCACTCTCAGTACAATCTG |
| | fusion protein | CTCTGATGCCGCATAGTTAAGCCAGTATCTGCTCCCTGCTTGTGTGTTGGAGGTCGCTGA |
| | with mRNA0038 | GTAGTGCGCGAGCAAAATTTAAGCTACAACAAGGCAAGGCTTGACCGACAATTGCATGAA |
| | | GAATCTGCTTAGGGTTAGGCGTTTTGCGCTGCTTCGCGATGTACGGGCCAGATATACGCG |
| | | TTGACATTGATTATTGACTAGTTATTAATAGTAATCAATTACGGGGTCATTAGTTCATAG |
| | | CCCATATATGGAGTTCCGCGTTACATAACTTACGGTAAATGGCCCGCCTGGCTGACCGCC |
| | | CAACGACCCCCGCCCATTGACGTCAATAATGACGTATGTTCCCATAGTAACGCCAATAGG |
| | | GACTTTCCATTGACGTCAATGGGTGGAGTATTTACGGTAAACTGCCCACTTGGCAGTACA |
| | | TCAAGTGTATCATATGCCAAGTACGCCCCCTATTGACGTCAATGACGGTAAATGGCCCGC |
| | | CTGGCATTATGCCCAGTACATGACCTTATGGGACTTTCCTACTTGGCAGTACATCTACGT |
| | | ATTAGTCATCGCTATTACCATGGTGATGCGGTTTTGGCAGTACATCAATGGGCGTGGATA |
| | | GCGGTTTGACTCACGGGGATTTCCAAGTCTCCACCCCATTGACGTCAATGGGAGTTTGTT |
| | | TTGGCACCAAAATCAACGGGACTTTCCAAAATGTCGTAACAACTCCGCCCCATTGACGCA |
| | | AATGGGCGGTAGGCGTGTACGGTGGGAGGTCTATATAAGCAGAGCTCTCTGGCTAACTAG |
| | | AGAACCCACTGCTTACTGGCTTATCGAAATTAATACGACTCACTATAAGGAGACCCAAGC |
| | | TACCGGTGCCACCATGTACCCATACGATGTTCCAGATTACGCTTCGCCGAAGAAAAAGCG |
| | | CAAGGTCAATCACGATCAGGAGTTCGACCCCCCTAAGGTGTACCCACCAGTGCCTGCAGA |
| | | GAAGAGGAAGCCAATCCGGGTGCTGAGCCTGTTTGATGGCATCGCCACCGGCCTGCTGGT |
| | | GCTGAAGGATCTGGGCATCCAGGTGGACCGGTACATCGCCTCCGAGGTGTGCGAGGATTC |
| | | TATCACCGTGGGCATGGTGCGCCACCAGGGCAAGATCATGTATGTGGGCGACGTGCGGTC |
| | | CGTGACACAGAAGCACATCCAGGAGTGGGGCCCATTCGATCTGGTGATCGGCGGCAGCCC |
| | | CTGTAATGACCTGTCCATCGTGAACCCTGCAAGGAAGGGACTGTACGAGGGAACCGGCCG |
| | | GCTGTTCTTTGAGTTTTATAGACTGCTGCACGACGCCAGGCCTAAGGAGGGCGACGATAG |
| | | ACCATTCTTTTGGCTGTTCGAGAATGTGGTGGCTATGGGCGTGAGCGATAAGAGGGACAT |
| | | CTCCAGGTTTCTGGAGTCTAACCCCGTGATGATCGATGCAAAGGAGGTGTCCGCCGCACA |
| | | CAGAGCCAGGTATTTCTGGGGCAATCTGCCAGGAATGAACAGGCCACTGGCAAGCACCGT |
| | | GAATGACAAGCTGGAGCTGCAGGAGTGCCTGGAGCACGGAAGGATCGCCAAGTTTTCCAA |
| | | GGTGCGCACAATCACCACACGGAGCAATTCCATCAAGCAGGGCAAGGATCAGCACTTCCC |
| | | CGTGTTCATGAACGAGAAGGAGGACATCCTGTGGTGTACCGAGATGGAGAGAGTGTTCGG |
| | | CTTTCCAGTGCACTACACAGACGTGTCTAACATGAGCAGGCTGGCAAGGCAGCGGCTGCT |
| | | GGGCAGATCTTGGAGCGTGCCCGTGATCAGGCACCTGTTCGCCCCTCTGAAGGAGTATTT |
| | | TGCCTGCGTGAGCAGCGGCAACTCCAATGCCAACAGCCGGGGCCCCTCTTTCAGCTCCGG |
| | | ATTGGTGCCTCTGAGCCTGAGGGGCTCCCACATGGCAGCAATCCCCGCCCTGGACCCCGA |
| | | GGCCGAGCCTAGCATGGACGTGATCCTGGTGGGCTCTAGCGAGCTGTCCTCTAGCGTGTC |
| | | TCCAGGAACCGGAAGGGATCTGATCGCATACGAGGTGAAGGCCAATCAGCGGAACATCGA |
| | | GGACATCTGTATCTGCTGTGGCAGCCTGCAGGTGCACACACAGCACCCACTGTTCGAGGG |
| | | AGGAATCTGCGCACCCTGTAAGGATAAGTTCCTGGACGCCCTGTTTCTGTACGACGATGA |
| | | CGGCTACCAGTCCTATTGCTCTATCTGCTGTTCCGGCGAGACCCTGCTGATCTGCGGCAA |
| | | TCCAGATTGTACAAGGTGCTATTGTTTTGAGTGCGTGGACTCTCTGGTGGGACCAGGCAC |
| | | CAGCGGAAAGGTGCACGCCATGTCCAACTGGGTGTGCTACCTGTGCCTGCCATCCTCTCG |
| | | CAGCGGACTGCTGCAGCGGAGAAGGAAGTGGAGATCCCAGCTGAAGGCCTTCTATGATAG |
| | | GGAGTCTGAGAACCCCCTGGAGATGTTTGAGACCGTGCCAGTGTGGCGCCGGCAGCCCGT |
| | | GAGGGTGCTGAGCCTGTTCGAGGATATCAAGAAGGAGCTGACATCCCTGGGCTTTCTGGA |
| | | GTCCGGCTCTGACCCCGGACAGCTGAAGCACGTGGTGGATGTGACCGACACAGTGCGGAA |
| | | GGATGTGGAGGAGTGGGGCCCTTTCGACCTGGTGTACGGAGCAACCCCTCCACTGGGACA |
| | | CACATGCGACAGACCCCCTTCTTGGTACCTGTTCCAGTTTCACCGCCTGCTGCAGTATGC |
| | | AAGGCCAAAGCCAGGCAGCCCTAGACCATTCTTTTGGATGTTCGTGGATAATCTGGTGCT |
| | | GAACAAGGAGGATCTGGACGTGGCCAGCAGGTTTCTGGAGATGGAGCCAGTGACCATCCC |
| | | AGACGTGCACGGCGGCTCCCTGCAGAATGCCGTGCGCGTGTGGTCTAACATCCCTGCCAT |
| | | CAGAAGCAGGCACTGGGCACTGGTGAGCGAGGAGGAGCTGTCCCTGCTGGCCCAGAATAA |
| | | GCAGAGCAGCAAGCTGGCCGCCAAGTGGCCTACAAAGCTGGTGAAGAACTGCTTCCTGCC |
| | | ACTGCGGGAGTACTTCAAGTATTTTTCCACCGAGCTGACATCTAGCCTGGGAGGACCCTC |
| | | CTCTGGCGCCCCACCACCTAGCGGCGGCTCCCCTGCCGGCTCTCCAACCAGCACAGAGGA |
| | | GGGCACCAGCGAGTCCGCCACACCAGAGTCTGGACCTGGCACCAGCACAGAGCCATCCGA |
| | | GGGCTCTGCCCCAGGCTCTCCTGCAGGCAGCCCTACCTCCACCGAAGAGGGCACCAGCAC |
| | | AGAGCCTTCTGAGGGCAGCGCCCCAGGCACCTCTACAGAGCCAAGCGAGCTCGAGTCCCG |
| | | GCCAGGGGAACGGCCCTTCCAGTGTCGGATCTGCATGAGAAACTTTTCACGCAAGCACCA |
| | | CCTTGGGAGACATACCAGAACCCACACTGGAGAGAAACCCTTTCAGTGCAGGATATGTAT |
| | | GCGGAATTTTTCCCGACGGGAACACCTCACGATTCATTTGCGGACACATACCGGGGGAGG |
| | | CGGTAGTCAGAAGCCTTTCCAATGCCGGATTTGCATGAGGAACTTCTCCCAGAGCTCATC |
| | | TCTCGTGCGGCACCTGCGGACACATACAGGCGAGAAGCCATTCCAGTGTAGGATCTGCAT |
| | | GCGCAATTTTAGCCGGAAGGAGCGATTGGCGACGCACCTGAAAACGCATACAGGTAGTCA |
| | | GAAGCCTTTTCAGTGCAGGATCTGCATGAGGAATTTTAGTGTAGCCCACAACCTGACTAG |
| | | GCATTTGAGGACGCATACTGGAGAGAAGCCCTTTCAGTGTAGGATTTGTATGCGGAACTT |
| | | CAGCATTTCTCACAATCTCGCGCGACATTTGAAAACTCATTTGCGCGGGTCTAGCCCCAA |
| | | GAAGAAGAGAAAGGTGGGAGTCGACGGATCCAGCGGCTCCGAGACCCCAGGCACATCTGA |
| | | GAGCGCCACCCCTGAGTCCCGGACCCTGGTGACATTCAAGGACGTGTTCGTGGACTTCAC |
| | | CCGGGAGGAGTGGAAGCTGCTGGACACAGCCCAGCAGATCGTGTACAGGAACGTGATGCT |
| | | GGAGAACTATAAGAATCTGGTGTCTCTGGGCTACCAGCTGACAAAGCCAGATGTGATCCT |
| | | GCGGCTGGAGAAGGGAGAGGAGCCCTGGCTGGTGTAGTCTAGAAATCAACCTCTGGATTA |
| | | CAAAATTTGTGAAAGATTGACTGGTATTCTTAACTATGTTGCTCCTTTTACGCTATGTGG |
| | | ATACGCTGCTTTAATGCCTTTGTATCATGCTATTGCTTCCCGTATGGCTTTCATTTTCTC |
| | | CTCCTTGTATAAATCCTGGTTGCTGTCTCTTTATGAGGAGTTGTGGCCCGTTGTCAGGCA |
| | | ACGTGGCGTGGTGTGCACTGTGTTTGCTGACGCAACCCCCACTGGTTGGGGCATTGCCAC |
| | | CACCTGTCAGCTCCTTTCCGGGACTTTCGCTTTCCCCCTCCCTATTGCCACGGCGGAACT |
| | | CATCGCCGCCTGCCTTGCCCGCTGCTGGACAGGGGCTCGGCTGTTGGGCACTGACAATTC |
| | | CGTGGTGTTGTCGGGGAAATCATCGTCCTTTCCTTGGCTGCTCGCCTGTGTTGCCACCTG |
| | | GATTCTGCGCGGGACGTCCTTCTGCTACGTCCCTTCGGCCCTCAATCCAGCGGACCTTCC |
| | | TTCCCGCGGCCTGCTGCCGGCTCTGCGGCCTCTTCCGCGTCTTCGCCTTCGCCCTCAGAC |
| | | GAGTCGGATCTCCCTTTGGGCCGCCTCCCCGCCTGTTAATTAAAAAAAAAAAAAAAAAAA |
| | | AAAAAAAAAAAAAAAAAAAAAAAAAAAAAAAAACTAGTGGCGCCTGATGCGGTATTTTCT |
| | | CCTTACGCATCTGTGCGGTATTTCACACCGCATAATCCAGCACAGTGGCGGCCCGTTTAA |
| | | ACCCGCTGATCAGCCTCGACTGTGCCTTCTAGTTGCCAGCCATCTGTTGTTTGCCCCTCC |
| | | CCCGTGCCTTCCTTGACCCTGGAAGGTGCCACTCCCACTGTCCTTTCCTAATAAAATGAG |
| | | GAAATTGCATCGCATTGTCTGAGTAGGTGTCATTCTATTCTGGGGGGTGGGGTGGGGCAG |
| | | GACAGCAAGGGGGAGGATTGGGAAGACAATAGCAGGCATGCTGGGGATGCGGTGGGCTCT |
| | | ATGGCTTCTGAGGCGGAAAGAACCAGCTGCATTAATGAATCGGCCAACGCGCGGGGAGAG |
| | | GCGGTTTGCGTATTGGGCGCTCTTCCGCTTCCTCGCTCACTGACTCGCTGCGCTCGGTCG |
| | | TTCGGCTGCGGCGAGCGGTATCAGCTCACTCAAAGGCGGTAATACGGTTATCCACAGAAT |
| | | CAGGGGATAACGCAGGAAAGAACATGTGAGCAAAAGGCCAGCAAAAGGCCAGGAACCGTA |
| | | AAAAGGCCGCGTTGCTGGCGTTTTTCCATAGGCTCCGCCCCCCTGACGAGCATCACAAAA |
| | | ATCGACGCTCAAGTCAGAGGTGGCGAAACCCGACAGGACTATAAAGATACCAGGCGTTTC |
| | | CCCCTGGAAGCTCCCTCGTGCGCTCTCCTGTTCCGACCCTGCCGCTTACCGGATACCTGT |
| | | CCGCCTTTCTCCCTTCGGGAAGCGTGGCGCTTTCTCATAGCTCACGCTGTAGGTATCTCA |
| | | GTTCGGTGTAGGTCGTTCGCTCCAAGCTGGGCTGTGTGCACGAACCCCCCGTTCAGCCCG |
| | | ACCGCTGCGCCTTATCCGGTAACTATCGTCTTGAGTCCAACCCGGTAAGACACGACTTAT |
| | | CGCCACTGGCAGCAGCCACTGGTAACAGGATTAGCAGAGCGAGGTATGTAGGCGGTGCTA |
| | | CAGAGTTCTTGAAGTGGTGGCCTAACTACGGCTACACTAGAAGAACAGTATTTGGTATCT |
| | | GCGCTCTGCTGAAGCCAGTTACCTTCGGAAAAAGAGTTGGTAGCTCTTGATCCGGCAAAC |
| | | AAACCACCGCTGGTAGCGGTTTTTTTGTTTGCAAGCAGCAGATTACGCGCAGAAAAAAAG |
| | | GATCTCAAGAAGATCCTTTGATCTTTTCTACGGGGTCTGACGCTCAGTGGAACGAAAACT |
| | | CACGTTAAGGGATTTTGGTCATGAGATTATCAAAAAGGATCTTCACCTAGATCCTTTTAA |
| | | ATTAAAAATGAAGTTTTAAATCAATCTAAAGTATATATGAGTAAACTTGGTCTGACAGTT |
| | | ACCAATGCTTAATCAGTGAGGCACCTATCTCAGCGATCTGTCTATTTCGTTCATCCATAG |
| | | TTGCCTGACTCCCCGTCGTGTAGATAACTACGATACGGGAGGGCTTACCATCTGGCCCCA |
| | | GTGCTGCAATGATACCGCGAGACCCACGCTCACCGGCTCCAGATTTATCAGCAATAAACC |
| | | AGCCAGCCGGAAGGGCCGAGCGCAGAAGTGGTCCTGCAACTTTATCCGCCTCCATCCAGT |
| | | CTATTAATTGTTGCCGGGAAGCTAGAGTAAGTAGTTCGCCAGTTAATAGTTTGCGCAACG |
| | | TTGTTGCCATTGCTACAGGCATCGTGGTGTCACGCTCGTCGTTTGGTATGGCTTCATTCA |
| | | GCTCCGGTTCCCAACGATCAAGGCGAGTTACATGATCCCCCATGTTGTGCAAAAAAGCGG |
| | | TTAGCTCCTTCGGTCCTCCGATCGTTGTCAGAAGTAAGTTGGCCGCAGTGTTATCACTCA |
| | | TGGTTATGGCAGCACTGCATAATTCTCTTACTGTCATGCCATCCGTAAGATGCTTTTCTG |
| | | TGACTGGTGAGTACTCAACCAAGTCATTCTGAGAATAGTGTATGCGGCGACCGAGTTGCT |
| | | CTTGCCCGGCGTCAATACGGGATAATACCGCGCCACATAGCAGAACTTTAAAAGTGCTCA |
| | | TCATTGGAAAACGTTCTTCGGGGCGAAAACTCTCAAGGATCTTACCGCTGTTGAGATCCA |
| | | GTTCGATGTAACCCACTCGTGCACCCAACTGATCTTCAGCATCTTTTACTTTCACCAGCG |
| | | TTTCTGGGTGAGCAAAAACAGGAAGGCAAAATGCCGCAAAAAAGGGAATAAGGGCGACAC |
| | | GGAAATGTTGAATACTCATACTCTTCCTTTTTCAATATTATTGAAGCATTTATCAGGGTT |
| | | ATTGTCTCATGAGCGGATACATATTTGAATGTATTTAGAAAAATAAACAAATAGGGGTTC |
| | | CGCGCACATTTCCCCGAAAAGTGCCACCTGA |
| 1245 | Plasmid for | CGTCGATCGACGGATCGGGAGATCTCCCGATCCCCTATGGTGCACTCTCAGTACAATCTG |
| | fusion protein | CTCTGATGCCGCATAGTTAAGCCAGTATCTGCTCCCTGCTTGTGTGTTGGAGGTCGCTGA |
| | with mRNA0039 | GTAGTGCGCGAGCAAAATTTAAGCTACAACAAGGCAAGGCTTGACCGACAATTGCATGAA |
| | | GAATCTGCTTAGGGTTAGGCGTTTTGCGCTGCTTCGCGATGTACGGGCCAGATATACGCG |
| | | TTGACATTGATTATTGACTAGTTATTAATAGTAATCAATTACGGGGTCATTAGTTCATAG |
| | | CCCATATATGGAGTTCCGCGTTACATAACTTACGGTAAATGGCCCGCCTGGCTGACCGCC |
| | | CAACGACCCCCGCCCATTGACGTCAATAATGACGTATGTTCCCATAGTAACGCCAATAGG |
| | | GACTTTCCATTGACGTCAATGGGTGGAGTATTTACGGTAAACTGCCCACTTGGCAGTACA |
| | | TCAAGTGTATCATATGCCAAGTACGCCCCCTATTGACGTCAATGACGGTAAATGGCCCGC |
| | | CTGGCATTATGCCCAGTACATGACCTTATGGGACTTTCCTACTTGGCAGTACATCTACGT |
| | | ATTAGTCATCGCTATTACCATGGTGATGCGGTTTTGGCAGTACATCAATGGGCGTGGATA |
| | | GCGGTTTGACTCACGGGGATTTCCAAGTCTCCACCCCATTGACGTCAATGGGAGTTTGTT |
| | | TTGGCACCAAAATCAACGGGACTTTCCAAAATGTCGTAACAACTCCGCCCCATTGACGCA |
| | | AATGGGCGGTAGGCGTGTACGGTGGGAGGTCTATATAAGCAGAGCTCTCTGGCTAACTAG |
| | | AGAACCCACTGCTTACTGGCTTATCGAAATTAATACGACTCACTATAAGGAGACCCAAGC |
| | | TACCGGTGCCACCATGTACCCATACGATGTTCCAGATTACGCTTCGCCGAAGAAAAAGCG |
| | | CAAGGTCAATCACGATCAGGAGTTCGACCCCCCTAAGGTGTACCCACCAGTGCCTGCAGA |
| | | GAAGAGGAAGCCAATCCGGGTGCTGAGCCTGTTTGATGGCATCGCCACCGGCCTGCTGGT |
| | | GCTGAAGGATCTGGGCATCCAGGTGGACCGGTACATCGCCTCCGAGGTGTGCGAGGATTC |
| | | TATCACCGTGGGCATGGTGCGCCACCAGGGCAAGATCATGTATGTGGGCGACGTGCGGTC |
| | | CGTGACACAGAAGCACATCCAGGAGTGGGGCCCATTCGATCTGGTGATCGGCGGCAGCCC |
| | | CTGTAATGACCTGTCCATCGTGAACCCTGCAAGGAAGGGACTGTACGAGGGAACCGGCCG |
| | | GCTGTTCTTTGAGTTTTATAGACTGCTGCACGACGCCAGGCCTAAGGAGGGCGACGATAG |
| | | ACCATTCTTTTGGCTGTTCGAGAATGTGGTGGCTATGGGCGTGAGCGATAAGAGGGACAT |
| | | CTCCAGGTTTCTGGAGTCTAACCCCGTGATGATCGATGCAAAGGAGGTGTCCGCCGCACA |
| | | CAGAGCCAGGTATTTCTGGGGCAATCTGCCAGGAATGAACAGGCCACTGGCAAGCACCGT |
| | | GAATGACAAGCTGGAGCTGCAGGAGTGCCTGGAGCACGGAAGGATCGCCAAGTTTTCCAA |
| | | GGTGCGCACAATCACCACACGGAGCAATTCCATCAAGCAGGGCAAGGATCAGCACTTCCC |
| | | CGTGTTCATGAACGAGAAGGAGGACATCCTGTGGTGTACCGAGATGGAGAGAGTGTTCGG |
| | | CTTTCCAGTGCACTACACAGACGTGTCTAACATGAGCAGGCTGGCAAGGCAGCGGCTGCT |
| | | GGGCAGATCTTGGAGCGTGCCCGTGATCAGGCACCTGTTCGCCCCTCTGAAGGAGTATTT |
| | | TGCCTGCGTGAGCAGCGGCAACTCCAATGCCAACAGCCGGGGCCCCTCTTTCAGCTCCGG |
| | | ATTGGTGCCTCTGAGCCTGAGGGGCTCCCACATGGCAGCAATCCCCGCCCTGGACCCCGA |
| | | GGCCGAGCCTAGCATGGACGTGATCCTGGTGGGCTCTAGCGAGCTGTCCTCTAGCGTGTC |
| | | TCCAGGAACCGGAAGGGATCTGATCGCATACGAGGTGAAGGCCAATCAGCGGAACATCGA |
| | | GGACATCTGTATCTGCTGTGGCAGCCTGCAGGTGCACACACAGCACCCACTGTTCGAGGG |
| | | AGGAATCTGCGCACCCTGTAAGGATAAGTTCCTGGACGCCCTGTTTCTGTACGACGATGA |
| | | CGGCTACCAGTCCTATTGCTCTATCTGCTGTTCCGGCGAGACCCTGCTGATCTGCGGCAA |
| | | TCCAGATTGTACAAGGTGCTATTGTTTTGAGTGCGTGGACTCTCTGGTGGGACCAGGCAC |
| | | CAGCGGAAAGGTGCACGCCATGTCCAACTGGGTGTGCTACCTGTGCCTGCCATCCTCTCG |
| | | CAGCGGACTGCTGCAGCGGAGAAGGAAGTGGAGATCCCAGCTGAAGGCCTTCTATGATAG |
| | | GGAGTCTGAGAACCCCCTGGAGATGTTTGAGACCGTGCCAGTGTGGCGCCGGCAGCCCGT |
| | | GAGGGTGCTGAGCCTGTTCGAGGATATCAAGAAGGAGCTGACATCCCTGGGCTTTCTGGA |
| | | GTCCGGCTCTGACCCCGGACAGCTGAAGCACGTGGTGGATGTGACCGACACAGTGCGGAA |
| | | GGATGTGGAGGAGTGGGGCCCTTTCGACCTGGTGTACGGAGCAACCCCTCCACTGGGACA |
| | | CACATGCGACAGACCCCCTTCTTGGTACCTGTTCCAGTTTCACCGCCTGCTGCAGTATGC |
| | | AAGGCCAAAGCCAGGCAGCCCTAGACCATTCTTTTGGATGTTCGTGGATAATCTGGTGCT |
| | | GAACAAGGAGGATCTGGACGTGGCCAGCAGGTTTCTGGAGATGGAGCCAGTGACCATCCC |
| | | AGACGTGCACGGCGGCTCCCTGCAGAATGCCGTGCGCGTGTGGTCTAACATCCCTGCCAT |
| | | CAGAAGCAGGCACTGGGCACTGGTGAGCGAGGAGGAGCTGTCCCTGCTGGCCCAGAATAA |
| | | GCAGAGCAGCAAGCTGGCCGCCAAGTGGCCTACAAAGCTGGTGAAGAACTGCTTCCTGCC |
| | | ACTGCGGGAGTACTTCAAGTATTTTTCCACCGAGCTGACATCTAGCCTGGGAGGACCCTC |
| | | CTCTGGCGCCCCACCACCTAGCGGCGGCTCCCCTGCCGGCTCTCCAACCAGCACAGAGGA |
| | | GGGCACCAGCGAGTCCGCCACACCAGAGTCTGGACCTGGCACCAGCACAGAGCCATCCGA |
| | | GGGCTCTGCCCCAGGCTCTCCTGCAGGCAGCCCTACCTCCACCGAAGAGGGCACCAGCAC |
| | | AGAGCCTTCTGAGGGCAGCGCCCCAGGCACCTCTACAGAGCCAAGCGAGCTCGAGTCCCG |
| | | GCCAGGGGAACGGCCCTTCCAGTGTCGGATCTGCATGAGAAACTTTTCACGAGTCGATCA |
| | | CCTCCACCGCCACCTGCGAACCCACACTGGAGAGAAACCCTTTCAGTGCAGGATATGTAT |
| | | GCGGAATTTTTCCAGGTCCGACCACCTCAGCTTGCACTTGAAGACACATACCGGGGGAGG |
| | | CGGTAGTCAGAAGCCTTTCCAATGCCGGATTTGCATGAGGAACTTCTCCCAATCTAGTTC |
| | | ATTGGTACGACATCTTAGGACACATACAGGCGAGAAGCCATTCCAGTGTAGGATCTGCAT |
| | | GCGCAATTTTAGCCGAAAAGAGCGGCTGGCGACCCACTTGAAAACGCATACAGGTAGTCA |
| | | GAAGCCTTTTCAGTGCAGGATCTGCATGAGGAATTTTAGTGTAGCGCATAACTTGACACG |
| | | GCACTTGCGCACGCATACTGGAGAGAAGCCCTTTCAGTGTAGGATTTGTATGCGGAACTT |
| | | CAGCATTTCCCATAATCTGGCGCGGCACCTGAAGACTCATTTGCGCGGGTCTAGCCCCAA |
| | | GAAGAAGAGAAAGGTGGGAGTCGACGGATCCAGCGGCTCCGAGACCCCAGGCACATCTGA |
| | | GAGCGCCACCCCTGAGTCCCGGACCCTGGTGACATTCAAGGACGTGTTCGTGGACTTCAC |
| | | CCGGGAGGAGTGGAAGCTGCTGGACACAGCCCAGCAGATCGTGTACAGGAACGTGATGCT |
| | | GGAGAACTATAAGAATCTGGTGTCTCTGGGCTACCAGCTGACAAAGCCAGATGTGATCCT |
| | | GCGGCTGGAGAAGGGAGAGGAGCCCTGGCTGGTGTAGTCTAGAAATCAACCTCTGGATTA |
| | | CAAAATTTGTGAAAGATTGACTGGTATTCTTAACTATGTTGCTCCTTTTACGCTATGTGG |
| | | ATACGCTGCTTTAATGCCTTTGTATCATGCTATTGCTTCCCGTATGGCTTTCATTTTCTC |
| | | CTCCTTGTATAAATCCTGGTTGCTGTCTCTTTATGAGGAGTTGTGGCCCGTTGTCAGGCA |
| | | ACGTGGCGTGGTGTGCACTGTGTTTGCTGACGCAACCCCCACTGGTTGGGGCATTGCCAC |
| | | CACCTGTCAGCTCCTTTCCGGGACTTTCGCTTTCCCCCTCCCTATTGCCACGGCGGAACT |
| | | CATCGCCGCCTGCCTTGCCCGCTGCTGGACAGGGGCTCGGCTGTTGGGCACTGACAATTC |
| | | CGTGGTGTTGTCGGGGAAATCATCGTCCTTTCCTTGGCTGCTCGCCTGTGTTGCCACCTG |
| | | GATTCTGCGCGGGACGTCCTTCTGCTACGTCCCTTCGGCCCTCAATCCAGCGGACCTTCC |
| | | TTCCCGCGGCCTGCTGCCGGCTCTGCGGCCTCTTCCGCGTCTTCGCCTTCGCCCTCAGAC |
| | | GAGTCGGATCTCCCTTTGGGCCGCCTCCCCGCCTGTTAATTAAAAAAAAAAAAAAAAAAA |
| | | AAAAAAAAAAAAAAAAAAAAAAAAAAAAAAAAACTAGTGGCGCCTGATGCGGTATTTTCT |
| | | CCTTACGCATCTGTGCGGTATTTCACACCGCATAATCCAGCACAGTGGCGGCCCGTTTAA |
| | | ACCCGCTGATCAGCCTCGACTGTGCCTTCTAGTTGCCAGCCATCTGTTGTTTGCCCCTCC |
| | | CCCGTGCCTTCCTTGACCCTGGAAGGTGCCACTCCCACTGTCCTTTCCTAATAAAATGAG |
| | | GAAATTGCATCGCATTGTCTGAGTAGGTGTCATTCTATTCTGGGGGGTGGGGTGGGGCAG |
| | | GACAGCAAGGGGGAGGATTGGGAAGACAATAGCAGGCATGCTGGGGATGCGGTGGGCTCT |
| | | ATGGCTTCTGAGGCGGAAAGAACCAGCTGCATTAATGAATCGGCCAACGCGCGGGGAGAG |
| | | GCGGTTTGCGTATTGGGCGCTCTTCCGCTTCCTCGCTCACTGACTCGCTGCGCTCGGTCG |
| | | TTCGGCTGCGGCGAGCGGTATCAGCTCACTCAAAGGCGGTAATACGGTTATCCACAGAAT |
| | | CAGGGGATAACGCAGGAAAGAACATGTGAGCAAAAGGCCAGCAAAAGGCCAGGAACCGTA |
| | | AAAAGGCCGCGTTGCTGGCGTTTTTCCATAGGCTCCGCCCCCCTGACGAGCATCACAAAA |
| | | ATCGACGCTCAAGTCAGAGGTGGCGAAACCCGACAGGACTATAAAGATACCAGGCGTTTC |
| | | CCCCTGGAAGCTCCCTCGTGCGCTCTCCTGTTCCGACCCTGCCGCTTACCGGATACCTGT |
| | | CCGCCTTTCTCCCTTCGGGAAGCGTGGCGCTTTCTCATAGCTCACGCTGTAGGTATCTCA |
| | | GTTCGGTGTAGGTCGTTCGCTCCAAGCTGGGCTGTGTGCACGAACCCCCCGTTCAGCCCG |
| | | ACCGCTGCGCCTTATCCGGTAACTATCGTCTTGAGTCCAACCCGGTAAGACACGACTTAT |
| | | CGCCACTGGCAGCAGCCACTGGTAACAGGATTAGCAGAGCGAGGTATGTAGGCGGTGCTA |
| | | CAGAGTTCTTGAAGTGGTGGCCTAACTACGGCTACACTAGAAGAACAGTATTTGGTATCT |
| | | GCGCTCTGCTGAAGCCAGTTACCTTCGGAAAAAGAGTTGGTAGCTCTTGATCCGGCAAAC |
| | | AAACCACCGCTGGTAGCGGTTTTTTTGTTTGCAAGCAGCAGATTACGCGCAGAAAAAAAG |
| | | GATCTCAAGAAGATCCTTTGATCTTTTCTACGGGGTCTGACGCTCAGTGGAACGAAAACT |
| | | CACGTTAAGGGATTTTGGTCATGAGATTATCAAAAAGGATCTTCACCTAGATCCTTTTAA |
| | | ATTAAAAATGAAGTTTTAAATCAATCTAAAGTATATATGAGTAAACTTGGTCTGACAGTT |
| | | ACCAATGCTTAATCAGTGAGGCACCTATCTCAGCGATCTGTCTATTTCGTTCATCCATAG |
| | | TTGCCTGACTCCCCGTCGTGTAGATAACTACGATACGGGAGGGCTTACCATCTGGCCCCA |
| | | GTGCTGCAATGATACCGCGAGACCCACGCTCACCGGCTCCAGATTTATCAGCAATAAACC |
| | | AGCCAGCCGGAAGGGCCGAGCGCAGAAGTGGTCCTGCAACTTTATCCGCCTCCATCCAGT |
| | | CTATTAATTGTTGCCGGGAAGCTAGAGTAAGTAGTTCGCCAGTTAATAGTTTGCGCAACG |
| | | TTGTTGCCATTGCTACAGGCATCGTGGTGTCACGCTCGTCGTTTGGTATGGCTTCATTCA |
| | | GCTCCGGTTCCCAACGATCAAGGCGAGTTACATGATCCCCCATGTTGTGCAAAAAAGCGG |
| | | TTAGCTCCTTCGGTCCTCCGATCGTTGTCAGAAGTAAGTTGGCCGCAGTGTTATCACTCA |
| | | TGGTTATGGCAGCACTGCATAATTCTCTTACTGTCATGCCATCCGTAAGATGCTTTTCTG |
| | | TGACTGGTGAGTACTCAACCAAGTCATTCTGAGAATAGTGTATGCGGCGACCGAGTTGCT |
| | | CTTGCCCGGCGTCAATACGGGATAATACCGCGCCACATAGCAGAACTTTAAAAGTGCTCA |
| | | TCATTGGAAAACGTTCTTCGGGGCGAAAACTCTCAAGGATCTTACCGCTGTTGAGATCCA |
| | | GTTCGATGTAACCCACTCGTGCACCCAACTGATCTTCAGCATCTTTTACTTTCACCAGCG |
| | | TTTCTGGGTGAGCAAAAACAGGAAGGCAAAATGCCGCAAAAAAGGGAATAAGGGCGACAC |
| | | GGAAATGTTGAATACTCATACTCTTCCTTTTTCAATATTATTGAAGCATTTATCAGGGTT |
| | | ATTGTCTCATGAGCGGATACATATTTGAATGTATTTAGAAAAATAAACAAATAGGGGTTC |
| | | CGCGCACATTTCCCCGAAAAGTGCCACCTGA |

1. An epigenetic editing system for modifying an epigenetic state of a hepatitis B virus (HBV) gene or genome comprising:
(i) a fusion protein, or a nucleic acid encoding the fusion protein,
wherein the fusion protein comprises:
(a) a DNA-binding domain that binds a target region of an HBV genome, wherein the DNA binding domain comprises a catalytically inactive CRISPR-Cas protein;
(b) an epigenetic repression domain; and
(ii) a gRNA, or a nucleic acid encoding the gRNA, wherein the gRNA comprises a region complementary to a strand of the target region of the HBV genome;
wherein the HBV genome is a covalently closed circular DNA (cccDNA) or an HBV integrated DNA;
wherein the target region of the HBV genome is located in a region within nucleotide 0-303, 1000-2448 or 2802-3182; and
wherein the HBV genome comprises HBV genotype A, HBV genotype B, HBV genotype C, HBV genotype D, HBV genotype E, HBV genotype F, HBV genotype G or HBV genotype H.

2. The epigenetic editing system of claim 1, wherein the HBV genome comprises a nucleotide sequence provided in SEQ ID NO: 1082 and/or SEQ ID NO: 1083.

3. The epigenetic editing system of claim 2, wherein the target region of the HBV genome is located in a region within nucleotide 0-303.

4. The epigenetic editing system of claim 2, wherein the target region of the HBV genome is located in a region within nucleotide 1000-2448.

5. The epigenetic editing system of claim 2, wherein the target region of the HBV genome is located in a region within nucleotide 2802-3182.

6. The epigenetic editing system of claim 1, wherein the target region comprises a sequence corresponding to any of SEQ ID NOs: 333-475, or any combination thereof.

7. The epigenetic editing system of claim 1, wherein the gRNA comprises a targeting domain corresponding to any of SEQ ID NOs: 333-475, or any combination thereof.

8. The epigenetic editing system of claim 1, wherein the gRNA comprises a sequence corresponding to any of SEQ ID NOs: 1093-1235, or any combination thereof.

9. The epigenetic editing system of claim 1, wherein the target region comprises a sequence corresponding to any of SEQ ID NO: 345, SEQ ID NO: 390, SEQ ID NO: 391, SEQ ID NO: 389, SEQ ID NO: 411, SEQ ID NO: 441, or SEQ ID NO: 457, or any combination thereof.

10. The epigenetic editing system of claim 1, wherein the gRNA comprises a targeting domain corresponding to any of SEQ ID NO: 345, SEQ ID NO: 390, SEQ ID NO: 391, SEQ ID NO: 389, SEQ ID NO: 411, SEQ ID NO: 441, or SEQ ID NO: 457, or any combination thereof.

11. The epigenetic editing system of claim 1, wherein the gRNA comprises a sequence corresponding to any of SEQ ID NO: 1105, SEQ ID NO: 1150, SEQ ID NO: 1151, SEQ ID NO: 1149, SEQ ID NO: 1171, SEQ ID NO: 1201, or SEQ ID NO: 1217, or any combination thereof.

12. The epigenetic editing system of claim 1, wherein the fusion protein of (i) comprises a DNMT domain.

13. The epigenetic editing system of claim 1, wherein the fusion protein of (i) comprises a DNMT3A and/or a DNMT3L domain.

14. The epigenetic editing system of claim 1, wherein the fusion protein of (i) comprises a KRAB domain.

15. The epigenetic editing system of claim 1, wherein the fusion protein of (i) comprises a nuclear localization signal (NLS).

16. A method comprising contacting an HBV genome with an epigenetic editing system, wherein the epigenetic editing system comprises:
(i) a fusion protein, or a nucleic acid encoding the fusion protein,
wherein the fusion protein comprises:
(a) a DNA-binding domain that binds a target region of an HBV genome, wherein the DNA binding domain comprises a catalytically inactive CRISPR-Cas protein;
(b) an epigenetic repression domain; and
(ii) a gRNA, or a nucleic acid encoding the gRNA, wherein the gRNA comprises a region complementary to a strand of the target region of the HBV genome;
wherein the HBV genome is a covalently closed circular DNA (cccDNA) or an HBV integrated DNA;
wherein the target region of the HBV genome is located in a region within nucleotide 0-303, 1000-2448 or 2802-3182; and
wherein the HBV genome comprises HBV genotype A, HBV genotype B, HBV genotype C, HBV genotype D, HBV genotype E, HBV genotype F, HBV genotype G or HBV genotype H.

17. The method of claim 16, wherein the HBV genome comprises a nucleotide sequence provided in SEQ ID NO: 1082 and/or SEQ ID NO: 1083.

18. The method of claim 16, wherein the target region comprises a sequence corresponding to any of SEQ ID NOs: 333-475, or any combination thereof.

19. The method of claim 16, wherein the gRNA comprises a targeting domain corresponding to any of SEQ ID NOs: 333-475, or any combination thereof.

20. The method of claim 16, wherein the gRNA comprises a sequence corresponding to any of SEQ ID NOs: 1093-1235, or any combination thereof.

21. The method of claim 16, wherein the target region comprises a sequence corresponding to any of SEQ ID NO: SEQ ID NO: 345, SEQ ID NO: 390, SEQ ID NO: 391, SEQ ID NO: 389, SEQ ID NO: 411, SEQ ID NO: 441, or SEQ ID NO: 457, or any combination thereof.

22. The method of claim 16, wherein the gRNA comprises a targeting domain corresponding to any of SEQ ID NO: 345, SEQ ID NO: 390, SEQ ID NO: 391, SEQ ID NO: 389, SEQ ID NO: 411, SEQ ID NO: 441, or SEQ ID NO: 457, or any combination thereof.

23. The method of claim 16, wherein the gRNA comprises a sequence corresponding to any of SEQ ID NO: 1105, SEQ ID NO: 1150, SEQ ID NO: 1151, SEQ ID NO: 1149, SEQ ID NO: 1171, SEQ ID NO: 1201, or SEQ ID NO: 1217, or any combination thereof.

24. The method of claim 16, wherein the fusion protein of (i) comprises a DNMT domain.

25. The method of claim 16, wherein the fusion protein of (i) comprises a DNMT3A and/or a DNMT3L domain.

26. The method of claim 16, wherein the fusion protein of (i) comprises a KRAB domain.

27. The method of claim 16, wherein the fusion protein of (i) comprises a nuclear localization signal (NLS).

28. The method of claim 16, wherein the method further comprises measuring:
(1) number of HBV viral episomes
(2) replication of the HBV genome, and/or
(3) expression of a protein product encoded by the HBV genome.

29. The method of claim 28, wherein the contacting results in a reduction of at least about 80% of (1), (2), and/or (3) compared to contacting the HBV genome with a suitable control.

30. The method of claim 28, wherein the measuring is performed 14 days or more after the contacting.

The application's sequence listing, which the Patent Office published only in electronic form, follows.

SEQUENCE LISTING (1251 sequences)

SEQ ID NO: 1 - DNA, 4107 bp, Streptococcus pyogenes
  source 1..4107: mol_type = genomic DNA
atggataagaaatactcaataggcttagatatcggcacaaatagcgtcggatgggcggtgatcactgatgaatataaggttccgtctaaaaagttcaaggttctgggaaatacagaccgccacagtatcaaaaaaaatcttataggggctcttttatttgacagtggagagacagcggaagcgactcgtctcaaacggacagctcgtagaaggtatacacgtcggaagaatcgtatttgttatctacaggagattttttcaaatgagatggcgaaagtagatgatagtttctttcatcgacttgaagagtcttttttggtggaagaagacaagaagcatgaacgtcatcctatttttggaaatatagtagatgaagttgcttatcatgagaaatatccaactatctatcatctgcgaaaaaaattggtagattctactgataaagcggatttgcgcttaatctatttggccttagcgcatatgattaagtttcgtggtcattttttgattgagggagatttaaatcctgataatagtgatgtggacaaactatttatccagttggtacaaacctacaatcaattatttgaagaaaaccctattaacgcaagtggagtagatgctaaagcgattctttctgcacgattgagtaaatcaagacgattagaaaatctcattgctcagctccccggtgagaagaaaaatggcttatttgggaatctcattgctttgtcattgggtttgacccctaattttaaatcaaattttgatttggcagaagatgctaaattacagctttcaaaagatacttacgatgatgatttagataatttattggcgcaaattggagatcaatatgctgatttgtttttggcagctaagaatttatcagatgctattttactttcagatatcctaagagtaaatactgaaataactaaggctcccctatcagcttcaatgattaaacgctacgatgaacatcatcaagacttgactcttttaaaagctttagttcgacaacaacttccagaaaagtataaagaaatcttttttgatcaatcaaaaaacggatatgcaggttatattgatgggggagctagccaagaagaattttataaatttatcaaaccaattttagaaaaaatggatggtactgaggaattattggtgaaactaaatcgtgaagatttgctgcgcaagcaacggacctttgacaacggctctattccccatcaaattcacttgggtgagctgcatgctattttgagaagacaagaagacttttatccatttttaaaagacaatcgtgagaagattgaaaaaatcttgacttttcgaattccttattatgttggtccattggcgcgtggcaatagtcgttttgcatggatgactcggaagtctgaagaaacaattaccccatggaattttgaagaagttgtcgataaaggtgcttcagctcaatcatttattgaacgcatgacaaactttgataaaaatcttccaaatgaaaaagtactaccaaaacatagtttgctttatgagtattttacggtttataacgaattgacaaaggtcaaatatgttactgaaggaatgcgaaaaccagcatttctttcaggtgaacagaagaaagccattgttgatttactcttcaaaacaaatcgaaaagtaaccgttaagcaattaaaagaagattatttcaaaaaaatagaatgttttgatagtgttgaaatttcaggagttgaagatagatttaatgcttcattaggtacctaccatgatttgctaaaaattattaaagataaagattttttggataatgaagaaaatgaagatatcttagaggatattgttttaacattgaccttatttgaagatagggagatgattgaggaaagacttaaaacatatgctcacctctttgatgataaggtgatgaaacagcttaaacgtcgccgttatactggttggggacgtttgtctcgaaaattgattaatggtattagggataagcaatctggcaaaacaatattagattttttgaaatcagatggttttgccaatcgcaattttatgcagctgatccatgatgatagtttgacatttaaagaagacattcaaaaagcacaagtgtctggacaaggcgatagtttacatgaacatattgcaaatttagctggtagccctgctattaaaaaaggtattttacagactgtaaaagttgttgatgaattggtcaaagtaatggggcggcataagccagaaaatatcgttattgaaatggcacgtgaaaatcagacaactcaaaagggccagaaaaattcgcgagagcgtatgaaacgaatcgaagaaggtatcaaagaattaggaagtcagattcttaaagagcatcctgttgaaaatactcaattgcaaaatgaaaagctctatctctattatctccaaaatggaagagacatgtatgtggaccaagaattagatattaatcgtttaagtgattatgatgtcgatcacattgttccacaaagtttccttaaagacgattcaatagacaataaggtcttaacgcgttctgataaaaatcgtggtaaatcggataacgttccaagtgaagaagtagtcaaaaagatgaaaaactattggagacaacttctaaacgccaagttaatcactcaacgtaagtttgataatttaacgaaagctgaacgtggaggtttgagtgaacttgataaagctggttttatcaaacgccaattggttgaaactcgccaaatcactaagcatgtggcacaaattttggatagtcgcatgaatactaaatacgatgaaaatgataaacttattcgagaggttaaagtgattaccttaaaatctaaattagtttctgacttccgaaaagatttccaattctataaagtacgtgagattaacaattaccatcatgcccatgatgcgtatctaaatgccgtcgttggaactgctttgattaagaaatatccaaaacttgaatcggagtttgtctatggtgattataaagtttatgatgttcgtaaaatgattgctaagtctgagcaagaaataggcaaagcaaccgcaaaatatttcttttactctaatatcatgaacttcttcaaaacagaaattacacttgcaaatggagagattcgcaaacgccctctaatcgaaactaatggggaaactggagaaattgtctgggataaagggcgagattttgccacagtgcgcaaagtattgtccatgccccaagtcaatattgtcaagaaaacagaagtacagacaggcggattctccaaggagtcaattttaccaaaaagaaattcggacaagcttattgctcgtaaaaaagactgggatccaaaaaaatatggtggttttgatagtccaacggtagcttattcagtcctagtggttgctaaggtggaaaaagggaaatcgaagaagttaaaatccgttaaagagttactagggatcacaattatggaaagaagttcctttgaaaaaaatccgattgactttttagaagctaaaggatataaggaagttaaaaaagacttaatcattaaactacctaaatatagtctttttgagttagaaaacggtcgtaaacggatgctggctagtgccggagaattacaaaaaggaaatgagctggctctgccaagcaaatatgtgaattttttatatttagctagtcattatgaaaagttgaagggtagtccagaagataacgaacaaaaacaattgtttgtggagcagcataagcattatttagatgagattattgagcaaatcagtgaattttctaagcgtgttattttagcagatgccaatttagataaagttcttagtgcatataacaaacatagagacaaaccaatacgtgaacaagcagaaaatattattcatttatttacgttgacgaatcttggagctcccgctgcttttaaatattttgatacaacaattgatcgtaaacgatatacgtctacaaaagaagttttagatgccactcttatccatcaatccatcactggtctttatgaaacacgcattgatttgagtcagctaggaggtgactga

SEQ ID NO: 2 - protein, 1368 aa, Streptococcus pyogenes [sequence omitted]

SEQ ID NO: 3 - protein, 1053 aa, Staphylococcus aureus
MKRNYILGLDIGITSVGYGIIDYETRDVIDAGVRLFKEANVENNEGRRSKRGARRLKRRRRHRIQRVKKLLFDYNLLTDHSELSGINPYEARVKGLSQKLSEEEFSAALLHLAKRRGVHNVNEVEEDTGNELSTKEQISRNSKALEEKYVAELQLERLKKDGEVRGSINRFKTSDYVKEAKQLLKVQKAYHQLDQSFIDTYIDLLETRRTYYEGPGEGSPFGWKDIKEWYEMLMGHCTYFPEELRSVKYAYNADLYNALNDLNNLVITRDENEKLEYYEKFQIIENVFKQKKKPTLKQIAKEILVNEEDIKGYRVTSTGKPEFTNLKVYHDIKDITARKEIIENAELLDQIAKILTIYQSSEDIQEELTNLNSELTQEEIEQISNLKGYTGTHNLSLKAINLILDELWHTNDNQIAIFNRLKLVPKKVDLSQQKEIPTTLVDDFILSPVVKRSFIQSIKVINAIIKKYGLPNDIIIELAREKNSKDAQKMINEMQKRNRQTNERIEEIIRTTGKENAKYLIEKIKLHDMQEGKCLYSLEAIPLEDLLNNPFNYEVDHIIPRSVSFDNSFNNKVLVKQEENSKKGNRTPFQYLSSSDSKISYETFKKHILNLAKGKGRISKTKKEYLLEERDINRFSVQKDFINRNLVDTRYATRGLMNLLRSYFRVNNLDVKVKSINGGFTSFLRRKWKFKKERNKGYKHHAEDALIIANADFIFKEWKKLDKAKKVMENQMFEEKQAESMPEIETEQEYKEIFITPHQIKHIKDFKDYKYSHRVDKKPNRELINDTLYSTRKDDKGNTLIVNNLNGLYDKDNDKLKKLINKSPEKLLMYHHDPQTYQKLKLIMEQYGDEKNPLYKYYEETGNYLTKYSKKDNGPVIKKIKYYGNKLNAHLDITDDYPNSRNKVVKLSLKPYRFDVYLDNGVYKFVTVKNLDVIKKENYYEVNSKCYEEAKKLKKISNQAEFIASFYNNDLIKINGELYRVIGVNNDLLNRIEVNMIDITYREYLENMNDKRPPRIIKTIASKTQSIKKYSTDILGNLYEVKSKKHPQIIKKG

SEQ ID NO: 4 - protein, 1300 aa, Francisella tularensis
  source 1..1300: note = subspecies: novicida
MSIYQEFVNKYSLSKTLRFELIPQGKTLENIKARGLILDDEKRAKDYKKAKQIIDKYHQFFIEEILSSVCISEDLLQNYSDVYFKLKKSDDDNLQKDFKSAKDTIKKQISEYIKDSEKFKNLFNQNLIDAKKGQESDLILWLKQSKDNGIELFKANSDITDIDEALEIIKSFKGWTTYFKGFHENRKNVYSSNDIPTSIIYRIVDDNLPKFLENKAKYESLKDKAPEAINYEQIKKDLAEELTFDIDYKTSEVNQRVFSLDEVFEIANFNNYLNQSGITKFNTIIGGKFVNGENTKRKGINEYINLYSQQINDKTLKKYKMSVLFKQILSDTESKSFVIDKLEDDSDVVTTMQSFYEQIAAFKTVEEKSIKETLSLLFDDLKAQKLDLSKIYFKNDKSLTDLSQQVFDDYSVIGTAVLEYITQQIAPKNLDNPSKKEQELIAKKTEKAKYLSLETIKLALEEFNKHRDIDKQCRFEEILANFAAIPMIFDEIAQNKDNLAQISIKYQNQGKKDLLQASAEDDVKAIKDLLDQTNNLLHKLKIFHISQSEDKANILDKDEHFYLVFEECYFELANIVPLYNKIRNYITQKPYSDEKFKLNFENSTLANGWDKNKEPDNTAILFIKDDKYYLGVMNKKNNKIFDDKAIKENKGEGYKKIVYKLLPGANKMLPKVFFSAKSIKFYNPSEDILRIRNHSTHTKNGSPQKGYEKFEFNIEDCRKFIDFYKQSISKHPEWKDFGFRFSDTQRYNSIDEFYREVENQGYKLTFENISESYIDSVVNQGKLYLFQIYNKDFSAYSKGRPNLHTLYWKALFDERNLQDVVYKLNGEAELFYRKQSIPKKITHPAKEAIANKNKDNPKKESVFEYDLIKDKRFTEDKFFFHCPITINFKSSGANKFNDEINLLLKEKANDVHILSIDRGERHLAYYTLVDGKGNIIKQDTFNIIGNDRMKTNYHDKLAAIEKDRDSARKDWKKINNIKEMKEGYLSQVVHEIAKLVIEYNAIVVFEDLNFGFKRGRFKVEKQVYQKLEKMLIEKLNYLVFKDNEFDKTGGVLRAYQLTAPFETFKKMGKQTGIIYYVPAGFTSKICPVTGFVNQLYPKYESVSKSQEFFSKFDKICYNLDKGYFEFSFDYKNFGDKAAKGKWTIASFGSRLINFRNSDKNHNWDTREVYPTKELEKLLKDYSIEYGHGECIKAAICGESDKKFFAKLTSVLNTILQMRNSKTGTELDYLISPVADVNGNFFDSRQAPKNMPQDADANGAYHIGLKGLMLLGRIKNNQEGKKLNLVIKNEEYFEFVQNRNN

SEQ ID NO: 5 - protein, 986 aa, unidentified
  source 1..986: note = CasX (Cas12E) sequence
MEKRINKIRKKLSADNATKPVSRSGPMKTLLVRVMTDDLKKRLEKRRKKPEVMPQVISNNAANNLRMLLDDYTKMKEAILQVYWQEFKDDHVGLMCKFAQPASKKIDQNKLKPEMDEKGNLTTAGFACSQCGQPLFVYKLEQVSEKGKAYTNYFGRCNVAEHEKLILLAQLKPEKDSDEAVTYSLGKFGQRALDFYSIHVTKESTHPVKPLAQIAGNRYASGPVGKALSDACMGTIASFLSKYQDIIIEHQKVVKGNQKRLESLRELAGKENLEYPSVTLPPQPHTKEGVDAYNEVIARVRMWVNLNLWQKLKLSRDDAKPLLRLKGFPSFPVVERRENEVDWWNTINEVKKLIDAKRDMGRVFWSGVTAEKRNTILEGYNYLPNENDHKKREGSLENPKKPAKRQFGDLLLYLEKKYAGDWGKVFDEAWERIDKKIAGLTSHIEREEARNAEDAQSKAVLTDWLRAKASFVLERLKEMDEKEFYACEIQLQKWYGDLRGNPFAVEAENRVVDISGFSIGSDGHSIQYRNLLAWKYLENGKREFYLLMNYGKKGRIRFTDGTDIKKSGKWQGLLYGGGKAKVIDLTFDPDDEQLIILPLAFGTRQGREFIWNDLLSLETGLIKLANGRVIEKTIYNKKIGRDEPALFVALTFERREVVDPSNIKPVNLIGVDRGENIPAVIALTDPEGCPLPEFKDSSGGPTDILRIGEGYKEKQRAIQAAKEVEQRRAGGYSRKFASKSRNLADDMVRNSARDLFYHAVTHDAVLVFENLSRGFGRQGKRTFMTERQYTKMEDWLTAKLAYEGLTSKTYLSKTLAQYTSKTCSNCGFTITTADYDGMLVRLKKTSDGWATTLNNKELKAEGQITYYNRYKRQTVEKELSAELDRLSEESGNNDISKWTKGRRDEALFLLKKRFSHRPVQEQFVCLDCGHEVHADEQAALNIARSWLFLNSNSTEFKSYKSGKQPFVGAWQAFYKRRLKEVWKPNA

SEQ ID NO: 6 - protein, 1125 aa, unidentified
  source 1..1125: note = CasY (Cas12d) sequence
MRKKLFKGYILHNKRLVYTGKAAIRSIKYPLVAPNKTALNNLSEKIIYDYEHLFGPLNVASYARNSNRYSLVDFWIDSLRAGVIWQSKSTSLIDLISKLEGSKSPSEKIFEQIDFELKNKLDKEQFKDIILLNTGIRSSSNVRSLRGRFLKCFKEEFRDTEEVIACVDKWSKDLIVEGKSILVSKQFLYWEEEFGIKIFPHFKDNHDLPKLTFFVEPSLEFSPHLPLANCLERLKKFDISRESLLGLDNNFSAFSNYFNELFNLLSRGEIKKIVTAVLAVSKSWENEPELEKRLHFLSEKAKLLGYPKLTSSWADYRMIIGGKIKSWHSNYTEQLIKVREDLKKHQIALDKLQEDLKKVVDSSLREQIEAQREALLPLLDTMLKEKDFSDDLELYRFILSDFKSLLNGSYQRYIQTEEERKEDRDVTKKYKDLYSNLRNIPRFFGESKKEQFNKFINKSLPTIDVGLKILEDIRNALETVSVRKPPSITEEYVTKQLEKLSRKYKINAFNSNRFKQITEQVLRKYNNGELPKISEVFYRYPRESHVAIRILPVKISNPRKDISYLLDKYQISPDWKNSNPGEVVDLIEIYKLTLGWLLSCNKDFSMDFSSYDLKLFPEAASLIKNFGSCLSGYYLSKMIFNCITSEIKGMITLYTRDKFVVRYVTQMIGSNQKFPLLCLVGEKQTKNFSRNWGVLIEEKGDLGEEKNQEKCLIFKDKTDFAKAKEVEIFKNNIWRIRTSKYQIQFLNRLFKKTKEWDLMNLVLSEPSLVLEEEWGVSWDKDKLLPLLKKEKSCEERLYYSLPLNLVPATDYKEQSAEIEQRNTYLGLDVGEFGVAYAVVRIVRDRIELLSWGFLKDPALRKIRERVQDMKKKQVMAVFSSSSTAVARVREMAIHSLRNQIHSIALAYKAKIIYEISISNFETGGNRMAKIYRSIKVSDVYRESGADTLVSEMIWGKKNKQMGNHISSYATSYTCCNCARTPFELVIDNDKEYEKGGDEFIFNVGDEKKVRGFLQKSLLGKTIKGKEVLKSIKEYARPPIREVLLEGEDVEQLLKRRGNSYIYRCPFCGYKTDADIQAALNIACRGYISDNAKDAVKEGERKLDYILEVRKLWEKNGAVLRSAKFL

SEQ ID NO: 7 - protein, 707 aa, unidentified
  source 1..707: note = CasPhi sequence
MADTPTLFTQFLRHHLPGQRFRKDILKQAGRILANKGEDATIAFLRGKSEESPPDFQPPVKCPIIACSRPLTEWPIYQASVAIQGYVYGQSLAEFEASDPGCSKDGLLGWFDKTGVCTDYFSVQGLNLIFQNARKRYIGVQTKVTNRNEKRHKKLKRINAKRIAEGLPELTSDEPESALDETGHLIDPPGLNTNIYCYQQVSPKPLALSEVNQLPTAYAGYSTSGDDPIQPMVTKDRLSISKGQPGYIPEHQRALLSQKKHRRMRGYGLKARALLVIVRIQDDWAVIDLRSLLRNAYWRRIVQTKEPSTITKLLKLVTGDPVLDATRMVATFTYKPGIVQVRSAKCLKNKQGSKLFSERYLNETVSVTSIDLGSNNLVAVATYRLVNGNTPELLQRFTLPSHLVKDFERYKQAHDTLEDSIQKTAVASLPQGQQTEIRMWSMYGFREAQERVCQELGLADGSIPWNVMTATSTILTDLFLARGGDPKKCMFTSEPKKKKNSKQVLYKIRDRAWAKMYRTLLSKETREAWNKALWGLKRGSPDYARLSKRKEELARRCVNYTISTAEKRAQCGRTIVALEDLNIGFFHGRGKQEPGWVGLFTRKKENRWLMQALHKAFLELAHHRGYHVIEVNPAYTSQTCPVCRHCDPDNRDQHNREAFHCIGCGFRGNADLDVATHNIAMVAITGESLKRARGSVASKTPQPLAAE

SEQ ID NO: 8 - protein, 426 aa, unidentified
  source 1..426: note = Cas12f1 (Cas14a) sequence
MIKVYRYEIVKPLDLDWKEFGTILRQLQQETRFALNKATQLAWEWMGFSSDYKDNHGEYPKSKDILGYTNVHGYAYHTIKTKAYRLNSGNLSQTIKRATDRFKAYQKEILRGDMSIPSYKRDIPLDLIKENISVNRMNHGDYIASLSLLSNPAKQEMNVKRKISVIIIVRGAGKTIMDRILSGEYQVSASQIIHDDRKNKWYLNISYDFEPQTRVLDLNKIMGIDLGVAVAVYMAFQHTPARYKLEGGEIENFRRQVESRRISMLRQGKYAGGARGGHGRDKRIKPIEQLRDKIANFRDTTNHRYSRYIVDMAIKEGCGTIQMEDLTNIRDIGSRFLQNWTYYDLQQKIIYKAEEAGIKVIKIDPQYTSQRCSECGNIDSGNRIGQAIFKCRACGYEANADYNAARNIAIPNIDKIIAESIKSGGS

SEQ ID NO: 9 - protein, 509 aa, unidentified
  source 1..509: note = Cas12f2 (Cas14b) sequence
NAMIAQKTIKIKLNPTKEQIIKLNSIIEEYIKVSNFTAKKIAEIQESFTDSGLTQGTCSECGKEKTYRKYHLLKKDNKLFCITCYKRKYSQFTLQKVEFQNKTGLRNVAKLPKTYYTNAIRFASDTFSGFDEIIKKKQNRLNSIQNRLNFWKELLYNPSNRNEIKIKVVKYAPKTDTREHPHYYSEAEIKGRIKRLEKQLKKFKMPKYPEFTSETISLQRELYSWKNPDELKISSITDKNESMNYYGKEYLKRYIDLINSQTPQILLEKENNSFYLCFPITKNIEMPKIDDTFEPVGIDWGITRNIAVVSILDSKTKKPKFVKFYSAGYILGKRKHYKSLRKHFGQKKRQDKINKLGTKEDRFIDSNIHKLAFLIVKEIRNHSNKPIILMENITDNREEAEKSMRQNILLHSVKSRLQNYIAYKALWNNIPTNLVKPEHTSQICNRCGHQDRENRPKGSKLFKCVKCNYMSNADFNASINIARKFYIGEYEPFYKDNEKMKSGVNSISM

SEQ ID NO: 10 - protein, 501 aa, unidentified
  source 1..501: note = Cas12f3 (Cas14c) sequence
MEVQKTVMKTLSLRILRPLYSQEIEKEIKEEEKERRKQAGGTGELDGGFYKKLEKKHSEMFSFDRLNLLLNQLQREIAKVYNHAISELYIATIAQGNKSNKHYISSIVYNRAYGYFYNAYIALGICSKVEANFRSNELLTQQSALPTAKSDNFPIVLHKQKGAEGEDGGFRISTEGSDLIFEIPIPFYEYNGENRKEPYKWVKKGGQKPVLKLILSTFRRQRNKGWAKDEGTDAEIRKVTEGKYQVSQIEINRGKKLGEHQKWFANFSIEQPIYERKPNRSIVGGLDVGIRSPLVCAINNSFSRYSVDSNDVFKFSKQVFAFRRRLLSKNSLKRKHGHAAHKLEPITEMTEKNDKFRKKIIERWAKEVTNFFVKNQVGIVQIEDLSTMKDREDHFFNQYLRGFWPYYQMQTLIENKLKEYGIEVKRVQAKYTSQLCSNPNCRYWNNYFNFEYRKVNKFPKFKCEKCNLEISADYNAARNLSTPDIEKFVAKATKGINLPEK

SEQ ID NO: 11 - protein, 582 aa, unidentified
  source 1..582: note = C2c8 sequence
MKVLEFKIHPTEEQVSKIDQSLAACKLLWNLSIALKEESKQRYYRKKHKFDEFSPEIWGLSYSGHYDEKEFKTLKDKEKKLLIGNPCCKIAYFKKTSNGKEYTPLNSIPIRRFMNAENIDKDAVNYLNRKKLAFYFRENTAKFIGEIETEFKKGFFKSVIKPAYDAAKKGIRGIPRFKGRRDKVETLVNGQPETIKIKSNGVIVSSKIGLLKIRGLDRLQGKAPRMAKITRKATGYYLQLTIETDDTIYKESDKCVGLDMGAVAIFTDDLGRQSEAKRYAKIQKKRLNRLQRQASRQKDNSNNQRKTYAKLARVHEKIARQRKGRNAQLAHKITSEYQSVILEDLNLKNMTAAAKPKEREDGDGYKQNGKKRKSGLNKALLDNAIGQLRTFIENKANERGRKIIRVNPKHTSQTCPNCGNIDKANRVSQSKFKCVSCGYEAHADQNAAANILIRGLRDEFLRAIGSLYKFPVSMIGKYPGLAGEFTPDLDANQESIGDAPIENAEHSISKQMKQEGNRTPTQPENGSQSLIFLSAPPQPCGDSHGTNNPKALPNKASKRSSKKPRGAIPENPDQLTIWDLLD

SEQ ID NO: 12 - protein, 1368 aa, synthetic construct
MDKKYSIGLAIGTNSVGWAVITDEYKVPSKKFKVLGNTDRHSIKKNLIGALLFDSGETAEATRLKRTARRRYTRRKNRICYLQEIFSNEMAKVDDSFFHRLEESFLVEEDKKHERHPIFGNIVDEVAYHEKYPTIYHLRKKLVDSTDKADLRLIYLALAHMIKFRGHFLIEGDLNPDNSDVDKLFIQLVQTYNQLFEENPINASGVDAKAILSARLSKSRRLENLIAQLPGEKKNGLFGNLIALSLGLTPNFKSNFDLAEDAKLQLSKDTYDDDLDNLLAQIGDQYADLFLAAKNLSDAILLSDILRVNTEITKAPLSASMIKRYDEHHQDLTLLKALVRQQLPEKYKEIFFDQSKNGYAGYIDGGASQEEFYKFIKPILEKMDGTEELLVKLNREDLLRKQRTFDNGSIPHQIHLGELHAILRRQEDFYPFLKDNREKIEKILTFRIPYYVGPLARGNSRFAWMTRKSEETITPWNFEEVVDKGASAQSFIERMTNFDKNLPNEKVLPKHSLLYEYFTVYNELTKVKYVTEGMRKPAFLSGEQKKAIVDLLFKTNRKVTVKQLKEDYFKKIECFDSVEISGVEDRFNASLGTYHDLLKIIKDKDFLDNEENEDILEDIVLTLTLFEDREMIEERLKTYAHLFDDKVMKQLKRRRYTGWGRLSRKLINGIRDKQSGKTILDFLKSDGFANRNFMQLIHDDSLTFKEDIQKAQVSGQGDSLHEHIANLAGSPAIKKGILQTVKVVDELVKVMGRHKPENIVIEMARENQTTQKGQKNSRERMKRIEEGIKELGSQILKEHPVENTQLQNEKLYLYYLQNGRDMYVDQELDINRLSDYDVDAIVPQSFLKDDSIDNKVLTRSDKNRGKSDNVPSEEVVKKMKNYWRQLLNAKLITQRKFDNLTKAERGGLSELDKAGFIKRQLVETRQITKHVAQILDSRMNTKYDENDKLIREVKVITLKSKLVSDFRKDFQFYKVREINNYHHAHDAYLNAVVGTALIKKYPKLESEFVYGDYKVYDVRKMIAKSEQEIGKATAKYFFYSNIMNFFKTEITLANGEIRKRPLIETNGETGEIVWDKGRDFATVRKVLSMPQVNIVKKTEVQTGGFSKESILPKRNSDKLIARKKDWDPKKYGGFDSPTVAYSVLVVAKVEKGKSKKLKSVKELLGITIMERSSFEKNPIDFLEAKGYKEVKKDLIIKLPKYSLFELENGRKRMLASAGELQKGNELALPSKYVNFLYLASHYEKLKGSPEDNEQKQLFVEQHKHYLDEIIEQISEFSKRVILADANLDKVLSAYNKHRDKPIREQAENIIHLFTLTNLGAPAAFKYFDTTIDRKRYTSTKEVLDATLIHQSITGLYETRIDLSQLGGD

SEQ ID NO: 13 - protein, 1053 aa, synthetic construct
MKRNYILGLAIGITSVGYGIIDYETRDVIDAGVRLFKEANVENNEGRRSKRGARRLKRRRRHRIQRVKKLLFDYNLLTDHSELSGINPYEARVKGLSQKLSEEEFSAALLHLAKRRGVHNVNEVEEDTGNELSTKEQISRNSKALEEKYVAELQLERLKKDGEVRGSINRFKTSDYVKEAKQLLKVQKAYHQLDQSFIDTYIDLLETRRTYYEGPGEGSPFGWKDIKEWYEMLMGHCTYFPEELRSVKYAYNADLYNALNDLNNLVITRDENEKLEYYEKFQIIENVFKQKKKPTLKQIAKEILVNEEDIKGYRVTSTGKPEFTNLKVYHDIKDITARKEIIENAELLDQIAKILTIYQSSEDIQEELTNLNSELTQEEIEQISNLKGYTGTHNLSLKAINLILDELWHTNDNQIAIFNRLKLVPKKVDLSQQKEIPTTLVDDFILSPVVKRSFIQSIKVINAIIKKYGLPNDIIIELAREKNSKDAQKMINEMQKRNRQTNERIEEIIRTTGKENAKYLIEKIKLHDMQEGKCLYSLEAIPLEDLLNNPFNYEVDHIIPRSVSFDNSFNNKVLVKQEEASKKGNRTPFQYLSSSDSKISYETFKKHILNLAKGKGRISKTKKEYLLEERDINRFSVQKDFINRNLVDTRYATRGLMNLLRSYFRVNNLDVKVKSINGGFTSFLRRKWKFKKERNKGYKHHAEDALIIANADFIFKEWKKLDKAKKVMENQMFEEKQAESMPEIETEQEYKEIFITPHQIKHIKDFKDYKYSHRVDKKPNRELINDTLYSTRKDDKGNTLIVNNLNGLYDKDNDKLKKLINKSPEKLLMYHHDPQTYQKLKLIMEQYGDEKNPLYKYYEETGNYLTKYSKKDNGPVIKKIKYYGNKLNAHLDITDDYPNSRNKVVKLSLKPYRFDVYLDNGVYKFVTVKNLDVIKKENYYEVNSKCYEEAKKLKKISNQAEFIASFYNNDLIKINGELYRVIGVNNDLLNRIEVNMIDITYREYLENMNDKRPPRIIKTIASKTQSIKKYSTDILGNLYEVKSKKHPQIIKKG

SEQ ID NO: 14 - protein, 1300 aa, synthetic construct
MSIYQEFVNKYSLSKTLRFELIPQGKTLENIKARGLILDDEKRAKDYKKAKQIIDKYHQFFIEEILSSVCISEDLLQNYSDVYFKLKKSDDDNLQKDFKSAKDTIKKQISEYIKDSEKFKNLFNQNLIDAKKGQESDLILWLKQSKDNGIELFKANSDITDIDEALEIIKSFKGWTTYFKGFHENRKNVYSSNDIPTSIIYRIVDDNLPKFLENKAKYESLKDKAPEAINYEQIKKDLAEELTFDIDYKTSEVNQRVFSLDEVFEIANFNNYLNQSGITKFNTIIGGKFVNGENTKRKGINEYINLYSQQINDKTLKKYKMSVLFKQILSDTESKSFVIDKLEDDSDVVTTMQSFYEQIAAFKTVEEKSIKETLSLLFDDLKAQKLDLSKIYFKNDKSLTDLSQQVFDDYSVIGTAVLEYITQQIAPKNLDNPSKKEQELIAKKTEKAKYLSLETIKLALEEFNKHRDIDKQCRFEEILANFAAIPMIFDEIAQNKDNLAQISIKYQNQGKKDLLQASAEDDVKAIKDLLDQTNNLLHKLKIFHISQSEDKANILDKDEHFYLVFEECYFELANIVPLYNKIRNYITQKPYSDEKFKLNFENSTLANGWDKNKEPDNTAILFIKDDKYYLGVMNKKNNKIFDDKAIKENKGEGYKKIVYKLLPGANKMLPKVFFSAKSIKFYNPSEDILRIRNHSTHTKNGSPQKGYEKFEFNIEDCRKFIDFYKQSISKHPEWKDFGFRFSDTQRYNSIDEFYREVENQGYKLTFENISESYIDSVVNQGKLYLFQIYNKDFSAYSKGRPNLHTLYWKALFDERNLQDVVYKLNGEAELFYRKQSIPKKITHPAKEAIANKNKDNPKKESVFEYDLIKDKRFTEDKFFFHCPITINFKSSGANKFNDEINLLLKEKANDVHILSIARGERHLAYYTLVDGKGNIIKQDTFNIIGNDRMKTNYHDKLAAIEKDRDSARKDWKKINNIKEMKEGYLSQVVHEIAKLVIEYNAIVVFEDLNFGFKRGRFKVEKQVYQKLEKMLIEKLNYLVFKDNEFDKTGGVLRAYQLTAPFETFKKMGKQTGIIYYVPAGFTSKICPVTGFVNQLYPKYESVSKSQEFFSKFDKICYNLDKGYFEFSFDYKNFGDKAAKGKWTIASFGSRLINFRNSDKNHNWDTREVYPTKELEKLLKDYSIEYGHGECIKAAICGESDKKFFAKLTSVLNTILQMRNSKTGTELDYLISPVADVNGNFFDSRQAPKNMPQDADANGAYHIGLKGLMLLGRIKNNQEGKKLNLVIKNEEYFEFVQNRNN

SEQ ID NO: 15 - protein, 1082 aa, synthetic construct
MAAFKPNSINYILGLAIGIASVGWAMVEIDEEENPIRLIDLGVRVFERAEVPKTGDSLAMARRLARSVRRLTRRRAHRLLRTRRLLKREGVLQAANFDENGLIKSLPNTPWQLRAAALDRKLTPLEWSAVLLHLIKHRGYLSQRKNEGETADKELGALLKGVAGNAHALQTGDFRTPAELALNKFEKESGHIRNQRSDYSHTFSRKDLQAELILLFEKQKEFGNPHVSGGLKEGIETLLMTQRPALSGDAVQKMLGHCTFEPAEPKAAKNTYTAERFIWLTKLNNLRILEQGSERPLTDTERATLMDEPYRKSKLTYAQARKLLGLEDTAFFKGLRYGKDNAEASTLMEMKAYHAISRALEKEGLKDKKSPLNLSPELQDEIGTAFSLFKTDEDITGRLKDRIQPEILEALLKHISFDKFVQISLKALRRIVPLMEQGKRYDEACAEIYGDHYGKKNTEEKIYLPPIPADEIRNPVVLRALSQARKVINGVVRRYGSPARIHIETAREVGKSFKDRKEIEKRQEENRKDREKAAAKFREYFPNFVGEPKSKDILKLRLYEQQHGKCLYSGKEINLGRLNEKGYVEIDAALPFSRTWDDSFNNKVLVLGSENQNKGNQTPYEYFNGKDNSREWQEFKARVETSRFPRSKKQRILLQKFDEDGFKERNLNDTRYVNRFLCQFVADRMRLTGKGKKRVFASNGQITNLLRGFWGLRKVRAENDRHHALDAVVVACSTVAMQQKITRFVRYKEMNAFDGKTIDKETGEVLHQKTHFPQPWEFFAQEVMIRVFGKPDGKPEFEEADTLEKLRTLLAEKLSSRPEAVHEYVTPLFVSRAPNRKMSGQGHMETVKSAKRLDEGVSVLRVPLTQLKLKDLEKMVNREREPKLYEALKARLEAHKDDPAKAFAEPFYKYDKAGNRTQQVKAVRVEQVQKTGVWVRNHNGIADNATMVRVDVFEKGDKYYLVPIYSWQVAKGILPDRAVVQGKDEEDWQLIDDSFNFKFSLHPNDLVEVITKKARMFGYFASCHRGTGNINIRIHDLDHKIGKNGILEGIGVKTALSFQKYQIDELGKEIRPCRLKKRPPVR

SEQ ID NO: 16 - protein, 984 aa, synthetic construct
MARILAFAIGISSIGWAFSENDELKDCGVRIFTKVENPKTGESLALPRRLARSARKRLARRKARLNHLKHLIANEFKLNYEDYQSFDESLAKAYKGSLISPYELRFRALNELLSKQDFARVILHIAKRRGYDDIKNSDDKEKGAILKAIKQNEEKLANYQSVGEYLYKEYFQKFKENSKEFTNVRNKKESYERCIAQSFLKDELKLIFKKQREFGFSFSKKFEEEVLSVAFYKRALKDFSHLVGNCSFFTDEKRAPKNSPLAFMFVALTRIINLLNNLKNTEGILYTKDDLNALLNEVLKNGTLTYKQTKKLLGLSDDYEFKGEKGTYFIEFKKYKEFIKALGEHNLSQDDLNEIAKDITLIKDEIKLKKALAKYDLNQNQIDSLSKLEFKDHLNISFKALKLVTPLMLEGKKYDEACNELNLKVAINEDKKDFLPAFNETYYKDEVTNPVVLRAIKEYRKVLNALLKKYGKVHKINIELAREVGKNHSQRAKIEKEQNENYKAKKDAELECEKLGLKINSKNILKLRLFKEQKEFCAYSGEKIKISDLQDEKMLEIDAIYPYSRSFDDSYMNKVLVFTKQNQEKLNQTPFEAFGNDSAKWQKIEVLAKNLPTKKQKRILDKNYKDKEQKNFKDRNLNDTRYIARLVLNYTKDYLDFLPLSDDENTKLNDTQKGSKVHVEAKSGMLTSALRHTWGFSAKDRNNHLHHAIDAVIIAYANNSIVKAFSDFKKEQESNSAELYAKKISELDYKNKRKFFEPFSGFRQKVLDKIDEIFVSKPERKKPSGALHEETFRKEEEFYQSYGGKEGVLKALELGKIRKVNGKIVKNGDMFRVDIFKHKKTNKFYAVPIYTMDFALKVLPNKAVARSKKGEIKDWILMDENYEFCFSLYKDSLILIQTKDMQEPEFVYYNAFTSSTVSLIVSKHDNKFETLSKNQKILFKNANEKEVIAKSIGIQNLKVFEKYIVSALGEVTKAEFRQREDFKK

SEQ ID NO: 17 - protein, 1122 aa, synthetic construct
MGSDLVLGLAIGIGSVGVGILNKVTGEIIHKNSRIFPAAQAENNLVRRTNRQGRRLARRKKHRRVRLNRLFEESGLITDFTKISINLNPYQLRVKGLTDELSNEELFIALKNMVKHRGISYLDDASDDGNSSVGDYAQIVKENSKQLETKTPGQIQLERYQTYGQLRGDFTVEKDGKKHRLINVFPTSAYRSEALRILQTQQEFNPQITDEFINRYLEILTGKRKYYHGPGNEKSRTDYGRYRTSGETLDNIFGILIGKCTFYPDEFRAAKASYTAQEFNLLNDLNNLTVPTETKKLSKEQKNQIINYVKNEKAMGPAKLFKYIAKLLSCDVADIKGYRIDKSGKAEIHTFEAYRKMKTLETLDIEQMDRETLDKLAYVLTLNTEREGIQEALEHEFADGSFSQKQVDELVQFRKANSSIFGKGWHNFSVKLMMELIPELYETSEEQMTILTRLGKQKTTSSSNKTKYIDEKLLTEEIYNPVVAKSVRQAIKIVNAAIKEYGDFDNIVIEMARETNEDDEKKAIQKIQKANKDEKDAAMLKAANQYNGKAELPHSVFHGHKQLATKIRLWHQQGERCLYTGKTISIHDLINNSNQFEVDAILPLSITFDDSLANKVLVYATANQEKGQRTPYQALDSMDDAWSFRELKAFVRESKTLSNKKKEYLLTEEDISKFDVRKKFIERNLVDTRYASRVVLNALQEHFRAHKIDTKVSVVRGQFTSQLRRHWGIEKTRDTYHHHAVDALIIAASSQLNLWKKQKNTLVSYSEDQLLDIETGELISDDEYKESVFKAPYQHFVDTLKSKEFEDSILFSYQVDSKFNRKISDATIYATRQAKVGKDKADETYVLGKIKDIYTQDGYDAFMKIYKKDKSKFLMYRHDPQTFEKVIEPILENYPNKQINEKGKEVPCNPFLKYKEEHGYIRKYSKKGNGPEIKSLKYYDSKLGNHIDITPKDSNNKVVLQSVSPWRADVYFNKTTGKYEILGLKYADLQFEKGTGTYKISQEKYNDIKKKEGVDSDSEFKFTLYKNDLLLVKDTETKEQQLFRFLSRTMPKQKHYVELKPYDKQKFEGGEALIKVLGNVANSGQCKKGLGKSNISIYKVRTDVLGNQHIIKNEGDKPKLDF

SEQ ID NO: 18 - protein, 1388 aa, synthetic construct
MTKPYSIGLAIGTNSVGWAVITDNYKVPSKKMKVLGNTSKKYIKKNLLGVLLFDSGITAEGRRLKRTARRRYTRRRNRILYLQEIFSTEMATLDDAFFQRLDDSFLVPDDKRDSKYPIFGNLVEEKVYHDEFPTIYHLRKYLADSTKKADLRLVYLALAHMIKYRGHFLIEGEFNSKNNDIQKNFQDFLDTYNAIFESDLSLENSKQLEEIVKDKISKLEKKDRILKLFPGEKNSGIFSEFLKLIVGNQADFRKCFNLDEKASLHFSKESYDEDLETLLGYIGDDYSDVFLKAKKLYDAILLSGFLTVTDNETEAPLSSAMIKRYNEHKEDLALLKEYIRNISLKTYNEVFKDDTKNGYAGYIDGKTNQEDFYVYLKNLLAEFEGADYFLEKIDREDFLRKQRTFDNGSIPYQIHLQEMRAILDKQAKFYPFLAKNKERIEKILTFRIPYYVGPLARGNSDFAWSIRKRNEKITPWNFEDVIDKESSAEAFINRMTSFDLYLPEEKVLPKHSLLYETFNVYNELTKVRFIAESMRDYQFLDSKQKKDIVRLYFKDKRKVTDKDIIEYLHAIYGYDGIELKGIEKQFNSSLSTYHDLLNIINDKEFLDDSSNEAIIEEIIHTLTIFEDREMIKQRLSKFENIFDKSVLKKLSRRHYTGWGKLSAKLINGIRDEKSGNTILDYLIDDGISNRNFMQLIHDDALSFKKKIQKAQIIGDEDKGNIKEVVKSLPGSPAIKKGILQSIKIVDELVKVMGGRKPESIVVEMARENQYTNQGKSNSQQRLKRLEKSLKELGSKILKENIPAKLSKIDNNALQNDRLYLYYLQNGKDMYTGDDLDIDRLSNYDIDHIIPQAFLKDNSIDNKVLVSSASARGKSDDFPSLEVVKKRKTFWYQLLKSKLISQRKFDNLTKAERGGLLPEDKAGFIQRQLVETRQITKHVARLLDEKFNNKKDENNRAVRTVKIITLKSTLVSQFRKDFELYKVREINDFHHAHDAYLNAVIASALLKKYPKLEPEFVYGDYPKYNSFRERKSATEKVYFYSNIMNIFKKSISLADGRVIERPLIEVNEETGESVWNKESDLATVRRVLSYPQVNVVKKVEEQNHGLDRGKPKGLFNANLSSKPKPNSNENLVGAKEYLDPKKYGGYAGISNSFAVLVKGTIEKGAKKKITNVLEFQGISILDRINYRKDKLNFLLEKGYKDIELIIELPKYSLFELSDGSRRMLASILSTNNKRGEIHKGNQIFLSQKFVKLLYHAKRISNTINENHRKYVENHKKEFEELFYYILEFNENYVGAKKNGKLLNSAFQSWQNHSIDELCSSFIGPTGSERKGLFELTSRGSAADFEFLGVKIPRYRDYTPSSLLKDATLIHQSVTGLYETRIDLAKLGEG

SEQ ID NO: 19 - protein, 1228 aa, synthetic construct
MSKLEKFTNCYSLSKTLRFKAIPVGKTQENIDNKRLLVEDEKRAEDYKGVKKLLDRYYLSFINDVLHSIKLKNLNNYISLFRKKTRTEKENKELENLEINLRKEIAKAFKGNEGYKSLFKKDIIETILPEFLDDKDEIALVNSFNGFTTAFTGFFDNRENMFSEEAKSTSIAFRCINENLTRYISNMDIFEKVDAIFDKHEVQEIKEKILNSDYDVEDFFEGEFFNFVLTQEGIDVYNAIIGGFVTESGEKIKGLNEYINLYNQKTKQKLPKFKPLYKQVLSDRESLSFYGEGYTSDEEVLEVFRNTLNKNSEIFSSIKKLEKLFKNFDEYSSAGIFVKNGPAISTISKDIFGEWNVIRDKWNAEYDDIHLKKKAVVTEKYEDDRRKSFKKIGSFSLEQLQEYADADLSVVEKLKEIIIQKVDEIYKVYGSSEKLFDADFVLEKSLKKNDAVVAIMKDLLDSVKSFENYIKAFFGEGKETNRDESFYGDFVLAYDILLKVDHIYDAIRNYVTQKPYSKDKFKLYFQNPQFMGGWDKDKETDYRATILRYGSKYYLAIMDKKYAKCLQKIDKDDVNGNYEKINYKLLPGPNKMLPKVFFSKKWMAYYNPSEDIQKIYKNGTFKKGDMFNLNDCHKLIDFFKDSISRYPKWSNAYDFNFSETEKYKDIAGFYREVEEQGYKVSFESASKKEVDKLVEEGKLYMFQIYNKDFSDKSHGTPNLHTMYFKLLFDENNHGQIRLSGGAELFMRRASLKKEELVVHPANSPIANKNPDNPKKTTTLSYDVYKDKRFSEDQYELHIPIAINKCPKNIFKINTEVRVLLKHDDNPYVIGIARGERNLLYIVVVDGKGNIVEQYSLNEIINNFNGIRIKTDYHSLLDKKEKERFEARQNWTSIENIKELKAGYISQVVHKICELVEKYDAVIALEDLNSGFKNSRVKVEKQVYQKFEKMLIDKLNYMVDKKSNPCATGGALKGYQITNKFESFKSMSTQNGFIFYIPAWLTSKIDPSTGFVNLLKTKYTSIADSKKFISSFDRIMYVPEEDLFEFALDYKNFSRTDADYIKKWKLYSYGNRIRIFRNPKKNNVFDWEEVCLTSAYKELFNKYGINYQQGDIRALLCEQSDKAFYSSFMALMSLMLQMRNSITGRTDVDFLISPVKNSDGIFYDSRNYEAQENAILPKNADANGAYNIARKVLWAIGQFKKAEDEKLDKVKIAISNKEWLEYAQTSVKH

SEQ ID NO: 20 - protein, 1307 aa, synthetic construct
MTQFEGFTNLYQVSKTLRFELIPQGKTLKHIQEQGFIEEDKARNDHYKELKPIIDRIYKTYADQCLQLVQLDWENLSAAIDSYRKEKTEETRNALIEEQATYRNAIHDYFIGRTDNLTDAINKRHAEIYKGLFKAELFNGKVLKQLGTVTTTEHENALLRSFDKFTTYFSGFYENRKNVFSAEDISTAIPHRIVQDNFPKFKENCHIFTRLITAVPSLREHFENVKKAIGIFVSTSIEEVFSFPFYNQLLTQTQIDLYNQLLGGISREAGTEKIKGLNEVLNLAIQKNDETAHIIASLPHRFIPLFKQILSDRNTLSFILEEFKSDEEVIQSFCKYKTLLRNENVLETAEALFNELNSIDLTHIFISHKKLETISSALCDHWDTLRNALYERRISELTGKITKSAKEKVQRSLKHEDINLQEIISAAGKELSEAFKQKTSEILSHAHAALDQPLPTTLKKQEEKEILKSQLDSLLGLYHLLDWFAVDESNEVDPEFSARLTGIKLEMEPSLSFYNKARNYATKKPYSVEKFKLNFQMPTLASGWDVNKEKNNGAILFVKNGLYYLGIMPKQKGRYKALSFEPTEKTSEGFDKMYYDYFPDAAKMIPKCSTQLKAVTAHFQTHTTPILLSNNFIEPLEITKEIYDLNNPEKEPKKFQTAYAKKTGDQKGYREALCKWIDFTRDFLSKYTKTTSIDLSSLRPSSQYKDLGEYYAELNPLLYHISFQRIAEKEIMDAVETGKLYLFQIYNKDFAKGHHGKPNLHTLYWTGLFSPENLAKTSIKLNGQAELFYRPKSRMKRMAHRLGEKMLNKKLKDQKTPIPDTLYQELYDYVNHRLSHDLSDEARALLPNVITKEVSHEIIKDRRFTSDKFFFHVPITLNYQAANSPSKFNQRVNAYLKEHPETPIIGIARGERNLIYITVIDSTGKILEQRSLNTIQQFDYQKKLDNREKERVAARQAWSVVGTIKDLKQGYLSQVIHEIVDLMIHYQAVVVLENLNFGFKSKRTGIAEKAVYQQFEKMLIDKLNCLVLKDYPAEKVGGVLNPYQLTDQFTSFAKMGTQSGFLFYVPAPYTSKIDPLTGFVDPFVWKTIKNHESRKHFLEGFDFLHYDVKTGDFILHFKMNRNLSFQRGLPGFMPAWDIVFEKNETQFDAKGTPFIAGKRIVPVIENHRFTGRYRDLYPANELIALLEEKGIVFRDGSNILPKLLENDDSHAIDTMVALIRSVLQMRNSNAATGEDYINSPVRDLNGVCFDSRFQNPEWPMDADANGAYHIALKGQLLLNHLKESKDLKLQNGISNQDWLAYIQELRN

SEQ ID NO: 21 - protein, 1307 aa, synthetic construct
MTQFEGFTNLYQVSKTLRFELIPQGKTLKHIQEQGFIEEDKARNDHYKELKPIIDRIYKTYADQCLQLVQLDWENLSAAIDSYRKEKTEETRNALIEEQATYRNAIHDYFIGRTDNLTDAINKRHAEIYKGLFKAELFNGKVLKQLGTVTTTEHENALLRSFDKFTTYFSGFYRNRKNVFSAEDISTAIPHRIVQDNFPKFKENCHIFTRLITAVPSLREHFENVKKAIGIFVSTSIEEVFSFPFYNQLLTQTQIDLYNQLLGGISREAGTEKIKGLNEVLNLAIQKNDETAHIIASLPHRFIPLFKQILSDRNTLSFILEEFKSDEEVIQSFCKYKTLLRNENVLETAEALFNELNSIDLTHIFISHKKLETISSALCDHWDTLRNALYERRISELTGKITKSAKEKVQRSLKHEDINLQEIISAAGKELSEAFKQKTSEILSHAHAALDQPLPTTLKKQEEKEILKSQLDSLLGLYHLLDWFAVDESNEVDPEFSARLTGIKLEMEPSLSFYNKARNYATKKPYSVEKFKLNFQMPTLARGWDVNREKNNGAILFVKNGLYYLGIMPKQKGRYKALSFEPTEKTSEGFDKMYYDYFPDAAKMIPKCSTQLKAVTAHFQTHTTPILLSNNFIEPLEITKEIYDLNNPEKEPKKFQTAYAKKTGDQKGYREALCKWIDFTRDFLSKYTKTTSIDLSSLRPSSQYKDLGEYYAELNPLLYHISFQRIAEKEIMDAVETGKLYLFQIYNKDFAKGHHGKPNLHTLYWTGLFSPENLAKTSIKLNGQAELFYRPKSRMKRMAHRLGEKMLNKKLKDQKTPIPDTLYQELYDYVNHRLSHDLSDEARALLPNVITKEVSHEIIKDRRFTSDKFFFHVPITLNYQAANSPSKFNQRVNAYLKEHPETPIIGIARGERNLIYITVIDSTGKILEQRSLNTIQQFDYQKKLDNREKERVAARQAWSVVGTIKDLKQGYLSQVIHEIVDLMIHYQAVVVLENLNFGFKSKRTGIAEKAVYQQFEKMLIDKLNCLVLKDYPAEKVGGVLNPYQLTDQFTSFAKMGTQSGFLFYVPAPYTSKIDPLTGFVDPFVWKTIKNHESRKHFLEGFDFLHYDVKTGDFILHFKMNRNLSFQRGLPGFMPAWDIVFEKNETQFDAKGTPFIAGKRIVPVIENHRFTGRYRDLYPANELIALLEEKGIVFRDGSNILPKLLENDDSHAIDTMVALIRSVLQMRNSNAATGEDYINSPVRDLNGVCFDSRFQNPEWPMDADANGAYHIALKGQLLLNHLKESKDLKLQNGISNQDWLAYIQELRN

SEQ ID NO: 22 - protein, 1307 aa, synthetic construct
MTQFEGFTNLYQVSKTLRFELIPQGKTLKHIQEQGFIEEDKARNDHYKELKPIIDRIYKTYADQCLQLVQLDWENLSAAIDSYRKEKTEETRNALIEEQATYRNAIHDYFIGRTDNLTDAINKRHAEIYKGLFKAELFNGKVLKQLGTVTTTEHENALLRSFDKFTTYFSGFYRNRKNVFSAEDISTAIPHRIVQDNFPKFKENCHIFTRLITAVPSLREHFENVKKAIGIFVSTSIEEVFSFPFYNQLLTQTQIDLYNQLLGGISREAGTEKIKGLNEVLALAIQKNDETAHIIASLPHRFIPLFKQILSDRNTLSFILEEFKSDEEVIQSFCKYKTLLRNENVLETAEALFNELNSIDLTHIFISHKKLETISSALCDHWDTLRNALYERRISELTGKITKSAKEKVQRSLKHEDINLQEIISAAGKELSEAFKQKTSEILSHAHAALDQPLPTTLKKQEEKEILKSQLDSLLGLYHLLDWFAVDESNEVDPEFSARLTGIKLEMEPSLSFYNKARNYATKKPYSVEKFKLNFQMPTLARGWDVNREKNNGAILFVKNGLYYLGIMPKQKGRYKALSFEPTEKTSEGFDKMYYDYFPDAAKMIPKCSTQLKAVTAHFQTHTTPILLSNNFIEPLEITKEIYDLNNPEKEPKKFQTAYAKKTGDQKGYREALCKWIDFTRDFLSKYTKTTSIDLSSLRPSSQYKDLGEYYAELNPLLYHISFQRIAEKEIMDAVETGKLYLFQIYNKDFAKGHHGKPNLHTLYWTGLFSPENLAKTSIKLNGQAELFYRPKSRMKRMAHRLGEKMLNKKLKDQKTPIPDTLYQELYDYVNHRLSHDLSDEARALLPNVITKEVSHEIIKDRRFTSDKFFFHVPITLNYQAANSPSKFNQRVNAYLKEHPETPIIGIARGERNLIYITVIDSTGKILEQRSLNTIQQFDYQKKLDNREKERVAARQAWSVVGTIKDLKQGYLSQVIHEIVDLMIHYQAVVVLENLNFGFKSKRTGIAEKAVYQQFEKMLIDKLNCLVLKDYPAEKVGGVLNPYQLTDQFTSFAKMGTQSGFLFYVPAPYTSKIDPLTGFVDPFVWKTIKNHESRKHFLEGFDFLHYDVKTGDFILHFKMNRNLSFQRGLPGFMPAWDIVFEKNETQFDAKGTPFIAGKRIVPVIENHRFTGRYRDLYPANELIALLEEKGIVFRDGSNILPKLLENDDSHAIDTMVALIRSVLQMRNSNAATGEDYINSPVRDLNGVCFDSRFQNPEWPMDADANGAYHIALKGQLLLNHLKESKDLKLQNGISNQDWLAYIQELRN

SEQ ID NO: 23 - protein, 1307 aa, synthetic construct
MTQFEGFTNLYQVSKTLRFELIPQGKTLKHIQEQGFIEEDKARNDHYKELKPIIDRIYKTYADQCLQLVQLDWENLSAAIDSYRKEKTEETRNALIEEQATYRNAIHDYFIGRTDNLTDAINKRHAEIYKGLFKAELFNGKVLKQLGTVTTTEHENALLRSFDKFTTYFSGFYENRKNVFSAEDISTAIPHRIVQDNFPKFKENCHIFTRLITAVPSLREHFENVKKAIGIFVSTSIEEVFSFPFYNQLLTQTQIDLYNQLLGGISREAGTEKIKGLNEVLNLAIQKNDETAHIIASLPHRFIPLFKQILSDRNTLSFILEEFKSDEEVIQSFCKYKTLLRNENVLETAEALFNELNSIDLTHIFISHKKLETISSALCDHWDTLRNALYERRISELTGKITKSAKEKVQRSLKHEDINLQEIISAAGKELSEAFKQKTSEILSHAHAALDQPLPTTLKKQEEKEILKSQLDSLLGLYHLLDWFAVDESNEVDPEFSARLTGIKLEMEPSLSFYNKARNYATKKPYSVEKFKLNFQMPTLARGWDVNVEKNRGAILFVKNGLYYLGIMPKQKGRYKALSFEPTEKTSEGFDKMYYDYFPDAAKMIPKCSTQLKAVTAHFQTHTTPILLSNNFIEPLEITKEIYDLNNPEKEPKKFQTAYAKKTGDQKGYREALCKWIDFTRDFLSKYTKTTSIDLSSLRPSSQYKDLGEYYAELNPLLYHISFQRIAEKEIMDAVETGKLYLFQIYNKDFAKGHHGKPNLHTLYWTGLFSPENLAKTSIKLNGQAELFYRPKSRMKRMAHRLGEKMLNKKLKDQKTPIPDTLYQELYDYVNHRLSHDLSDEARALLPNVITKEVSHEIIKDRRFTSDKFFFHVPITLNYQAANSPSKFNQRVNAYLKEHPETPIIGIARGERNLIYITVIDSTGKILEQRSLNTIQQFDYQKKLDNREKERVAARQAWSVVGTIKDLKQGYLSQVIHEIVDLMIHYQAVVVLENLNFGFKSKRTGIAEKAVYQQFEKMLIDKLNCLVLKDYPAEKVGGVLNPYQLTDQFTSFAKMGTQSGFLFYVPAPYTSKIDPLTGFVDPFVWKTIKNHESRKHFLEGFDFLHYDVKTGDFILHFKMNRNLSFQRGLPGFMPAWDIVFEKNETQFDAKGTPFIAGKRIVPVIENHRFTGRYRDLYPANELIALLEEKGIVFRDGSNILPKLLENDDSHAIDTMVALIRSVLQMRNSNAATGEDYINSPVRDLNGVCFDSRFQNPEWPMDADANGAYHIALKGQLLLNHLKESKDLKLQNGISNQDWLAYIQELRN

SEQ ID NO: 24 - protein, 1307 aa, synthetic construct
MTQFEGFTNLYQVSKTLRFELIPQGKTLKHIQEQGFIEEDKARNDHYKELKPIIDRIYKTYADQCLQLVQLDWENLSAAIDSYRKEKTEETRNALIEEQATYRNAIHDYFIGRTDNLTDAINKRHAEIYKGLFKAELFNGKVLKQLGTVTTTEHENALLRSFDKFTTYFSGFYENRKNVFSAEDISTAIPHRIVQDNFPKFKENCHIFTRLITAVPSLREHFENVKKAIGIFVSTSIEEVFSFPFYNQLLTQTQIDLYNQLLGGISREAGTEKIKGLNEVLNLAIQKNDETAHIIASLPHRFIPLFKQILSDRNTLSFILEEFKSDEEVIQSFCKYKTLLRNENVLETAEALFNELNSIDLTHIFISHKKLETISSALCDHWDTLRNALYERRISELTGKITKSAKEKVQRSLKHEDINLQEIISAAGKELSEAFKQKTSEILSHAHAALDQPLPTTLKKQEEKEILKSQLDSLLGLYHLLDWFAVDESNEVDPEFSARLTGIKLEMEPSLSFYNKARNYATKKPYSVEKFKLNFQMPTLARGWDVNKEKNNGAILFVKNGLYYLGIMPKQKGRYKALSFEPTEKTSEGFDKMYYDYFPDAAKMIPRCSTQLKAVTAHFQTHTTPILLSNNFIEPLEITKEIYDLNNPEKEPKKFQTAYAKKTGDQKGYREALCKWIDFTRDFLSKYTKTTSIDLSSLRPSSQYKDLGEYYAELNPLLYHISFQRIAEKEIMDAVETGKLYLFQIYNKDFAKGHHGKPNLHTLYWTGLFSPENLAKTSIKLNGQAELFYRPKSRMKRMAHRLGEKMLNKKLKDQKTPIPDTLYQELYDYVNHRLSHDLSDEARALLPNVITKEVSHEIIKDRRFTSDKFFFHVPITLNYQAANSPSKFNQRVNAYLKEHPETPIIGIARGERNLIYITVIDSTGKILEQRSLNTIQQFDYQKKLDNREKERVAARQAWSVVGTIKDLKQGYLSQVIHEIVDLMIHYQAVVVLENLNFGFKSKRTGIAEKAVYQQFEKMLIDKLNCLVLKDYPAEKVGGVLNPYQLTDQFTSFAKMGTQSGFLFYVPAPYTSKIDPLTGFVDPFVWKTIKNHESRKHFLEGFDFLHYDVKTGDFILHFKMNRNLSFQRGLPGFMPAWDIVFEKNETQFDAKGTPFIAGKRIVPVIENHRFTGRYRDLYPANELIALLEEKGIVFRDGSNILPKLLENDDSHAIDTMVALIRSVLQMRNSNAATGEDYINSPVRDLNGVCFDSRFQNPEWPMDADANGAYHIALKGQLLLNHLKESKDLKLQNGISNQDWLAYIQELRN

SEQ ID NO: 25 - protein, 986 aa, synthetic construct
MEKRINKIRKKLSADNATKPVSRSGPMKTLLVRVMTDDLKKRLEKRRKKPEVMPQVISNNAANNLRMLLDDYTKMKEAILQVYWQEFKDDHVGLMCKFAQPASKKIDQNKLKPEMDEKGNLTTAGFACSQCGQPLFVYKLEQVSEKGKAYTNYFGRCNVAEHEKLILLAQLKPEKDSDEAVTYSLGKFGQRALDFYSIHVTKESTHPVKPLAQIAGNRYASGPVGKALSDACMGTIASFLSKYQDIIIEHQKVVKGNQKRLESLRELAGKENLEYPSVTLPPQPHTKEGVDAYNEVIARVRMWVNLNLWQKLKLSRDDAKPLLRLKGFPSFPVVERRENEVDWWNTINEVKKLIDAKRDMGRVFWSGVTAEKRNTILEGYNYLPNENDHKKREGSLENPKKPAKRQFGDLLLYLEKKYAGDWGKVFDEAWERIDKKIAGLTSHIEREEARNAEDAQSKAVLTDWLRAKASFVLERLKEMDEKEFYACEIQLQKWYGDLRGNPFAVEAENRVVDISGFSIGSDGHSIQYRNLLAWKYLENGKREFYLLMNYGKKGRIRFTDGTDIKKSGKWQGLLYGGGKAKVIDLTFDPDDEQLIILPLAFGTRQGREFIWNDLLSLETGLIKLANGRVIEKTIYNKKIGRDEPALFVALTFERREVVDPSNIKPVNLIGVARGENIPAVIALTDPEGCPLPEFKDSSGGPTDILRIGEGYKEKQRAIQAAKEVEQRRAGGYSRKFASKSRNLADDMVRNSARDLFYHAVTHDAVLVFANLSRGFGRQGKRTFMTERQYTKMEDWLTAKLAYEGLTSKTYLSKTLAQYTSKTCSNCGFTITTADYDGMLVRLKKTSDGWATTLNNKELKAEGQITYYNRYKRQTVEKELSAELDRLSEESGNNDISKWTKGRRDEALFLLKKRFSHRPVQEQFVCLDCGHEVHAAEQAALNIARSWLFLNSNSTEFKSYKSGKQPFVGAWQAFYKRRLKEVWKPNA

SEQ ID NO: 26 - protein, 757 aa, synthetic construct
MPKPAVESEFSKVLKKHFPGERFRSSYMKRGGKILAAQGEEAVVAYLQGKSEEEPPNFQPPAKCHVVTKSRDFAEWPIMKASEAIQRYIYALSTTERAACKPGKSSESHAAWFAATGVSNHGYSHVQGLNLIFDHTLGRYDGVLKKVQLRNEKARARLESINASRADEGLPEIKAEEEEVATNETGHLLQPPGINPSFYVYQTISPQAYRPRDEIVLPPEYAGYVRDPNAPIPLGVVRNRCDIQKGCPGYIPEWQREAGTAISPKTGKAVTVPGLSPKKNKRMRRYWRSEKEKAQDALLVTVRIGTDWVVIDVRGLLRNARWRTIAPKDISLNALLDLFTGDPVIDVRRNIVTFTYTLDACGTYARKWTLKGKQTKATLDKLTATQTVALVAIALGQTNPISAGISRVTQENGALQCEPLDRFTLPDDLLKDISAYRIAWDRNEEELRARSVEALPEAQQAEVRALDGVSKETARTQLCADFGLDPKRLPWDKMSSNTTFISEALLSNSVSRDQVFFTPAPKKGAKKKAPVEVMRKDRTWARAYKPRLSVEAQKLKNEALWALKRTSPEYLKLSRRKEELCRRSINYVIEKTRRRTQCQIVIPVIEDLNVRFFHGSGKRLPGWDNFFTAKKENRWFIQGLHKAFSDLRTHRSFYVFEVRPERTSITCPKCGHCEVGNRDGEAFQCLSCGKTCNADLDVATHNLTQVALTGKTMPKREEPRDAQGTAPARKTKKASKSKAPPAEREDQTPAQEPSQTS

SEQ ID NO: 27 - protein, 1368 aa, synthetic construct
MDKKYSIGLAIGTNSVGWAVITDEYKVPSKKFKVLGNTDRHSIKKNLIGALLFDSGETAEATRLKRTARRRYTRRKNRICYLQEIFSNEMAKVDDSFFHRLEESFLVEEDKKHERHPIFGNIVDEVAYHEKYPTIYHLRKKLVDSTDKADLRLIYLALAHMIKFRGHFLIEGDLNPDNSDVDKLFIQLVQTYNQLFEENPINASGVDAKAILSARLSKSRRLENLIAQLPGEKKNGLFGNLIALSLGLTPNFKSNFDLAEDAKLQLSKDTYDDDLDNLLAQIGDQYADLFLAAKNLSDAILLSDILRVNTEITKAPLSASMIKRYDEHHQDLTLLKALVRQQLPEKYKEIFFDQSKNGYAGYIDGGASQEEFYKFIKPILEKMDGTEELLVKLNREDLLRKQRTFDNGSIPHQIHLGELHAILRRQEDFYPFLKDNREKIEKILTFRIPYYVGPLARGNSRFAWMTRKSEETITPWNFEEVVDKGASAQSFIERMTNFDKNLPNEKVLPKHSLLYEYFTVYNELTKVKYVTEGMRKPAFLSGEQKKAIVDLLFKTNRKVTVKQLKEDYFKKIECFDSVEISGVEDRFNASLGTYHDLLKIIKDKDFLDNEENEDILEDIVLTLTLFEDREMIEERLKTYAHLFDDKVMKQLKRRRYTGWGRLSRKLINGIRDKQSGKTILDFLKSDGFANRNFMQLIHDDSLTFKEDIQKAQVSGQGDSLHEHIANLAGSPAIKKGILQTVKVVDELVKVMGRHKPENIVIEMARENQTTQKGQKNSRERMKRIEEGIKELGSQILKEHPVENTQLQNEKLYLYYLQNGRDMYVDQELDINRLSDYDVDAIVPQSFLKDDSIDNKVLTRSDKNRGKSDNVPSEEVVKKMKNYWRQLLNAKLITQRKFDNLTKAERGGLSELDKAGFIKRQLVETRQITKHVAQILDSRMNTKYDENDKLIREVKVITLKSKLVSDFRKDFQFYKVREINNYHHAHDAYLNAVVGTALIKKYPKLESEFVYGDYKVYDVRKMIAKSEQEIGKATAKYFFYSNIMNFFKTEITLANGEIRKRPLIETNGETGEIVWDKGRDFATVRKVLSMPQVNIVKKTEVQTGGFSKESILPKRNSDKLIARKKDWDPKKYGGFVSPTVAYSVLVVAKVEKGKSKKLKSVKELLGITIMERSSFEKNPIDFLEAKGYKEVKKDLIIKLPKYSLFELENGRKRMLASARELQKGNELALPSKYVNFLYLASHYEKLKGSPEDNEQKQLFVEQHKHYLDEIIEQISEFSKRVILADANLDKVLSAYNKHRDKPIREQAENIIHLFTLTNLGAPAAFKYFDTTIDRKEYRSTKEVLDATLIHQSITGLYETRIDLSQLGGD

SEQ ID NO: 28 - protein, 1368 aa, synthetic construct
MDKKYSIGLAIGTNSVGWAVITDEYKVPSKKFKVLGNTDRHSIKKNLIGALLFDSGETAEATRLKRTARRRYTRRKNRICYLQEIFSNEMAKVDDSFFHRLEESFLVEEDKKHERHPIFGNIVDEVAYHEKYPTIYHLRKKLVDSTDKADLRLIYLALAHMIKFRGHFLIEGDLNPDNSDVDKLFIQLVQTYNQLFEENPINASGVDAKAILSARLSKSRRLENLIAQLPGEKKNGLFGNLIALSLGLTPNFKSNFDLAEDAKLQLSKDTYDDDLDNLLAQIGDQYADLFLAAKNLSDAILLSDILRVNTEITKAPLSASMIKRYDEHHQDLTLLKALVRQQLPEKYKEIFFDQSKNGYAGYIDGGASQEEFYKFIKPILEKMDGTEELLVKLNREDLLRKQRTFDNGSIPHQIHLGELHAILRRQEDFYPFLKDNREKIEKILTFRIPYYVGPLARGNSRFAWMTRKSEETITPWNFEEVVDKGASAQSFIERMTNFDKNLPNEKVLPKHSLLYEYFTVYNELTKVKYVTEGMRKPAFLSGEQKKAIVDLLFKTNRKVTVKQLKEDYFKKIECFDSVEISGVEDRFNASLGTYHDLLKIIKDKDFLDNEENEDILEDIVLTLTLFEDREMIEERLKTYAHLFDDKVMKQLKRRRYTGWGRLSRKLINGIRDKQSGKTILDFLKSDGFANRNFMQLIHDDSLTFKEDIQKAQVSGQGDSLHEHIANLAGSPAIKKGILQTVKVVDELVKVMGRHKPENIVIEMARENQTTQKGQKNSRERMKRIEEGIKELGSQILKEHPVENTQLQNEKLYLYYLQNGRDMYVDQELDINRLSDYDVDAIVPQSFLKDDSIDNKVLTRSDKNRGKSDNVPSEEVVKKMKNYWRQLLNAKLITQRKFDNLTKAERGGLSELDKAGFIKRQLVETRQITKHVAQILDSRMNTKYDENDKLIREVKVITLKSKLVSDFRKDFQFYKVREINNYHHAHDAYLNAVVGTALIKKYPKLESEFVYGDYKVYDVRKMIAKSEQEIGKATAKYFFYSNIMNFFKTEITLANGEIRKRPLIETNGETGEIVWDKGRDFATVRKVLSMPQVNIVKKTEVQTGGFSKESILPKRNSDKLIARKKDWDPKKYGGFESPTVAYSVLVVAKVEKGKSKKLKSVKELLGITIMERSSFEKNPIDFLEAKGYKEVKKDLIIKLPKYSLFELENGRKRMLASAGELQKGNELALPSKYVNFLYLASHYEKLKGSPEDNEQKQLFVEQHKHYLDEIIEQISEFSKRVILADANLDKVLSAYNKHRDKPIREQAENIIHLFTLTNLGAPAAFKYFDTTIDRKQYRSTKEVLDATLIHQSITGLYETRIDLSQLGGD

SEQ ID NO: 29 - protein, 1368 aa, synthetic construct
MDKKYSIGLAIGTNSVGWAVITDEYKVPSKKFKVLGNTDRHSIKKNLIGALLFDSGETAEATRLKRTARRRYTRRKNRICYLQEIFSNEMAKVDDSFFHRLEESFLVEEDKKHERHPIFGNIVDEVAYHEKYPTIYHLRKKLVDSTDKADLRLIYLALAHMIKFRGHFLIEGDLNPDNSDVDKLFIQLVQTYNQLFEENPINASGVDAKAILSARLSKSRRLENLIAQLPGEKKNGLFGNLIALSLGLTPNFKSNFDLAEDAKLQLSKDTYDDDLDNLLAQIGDQYADLFLAAKNLSDAILLSDILRVNTEITKAPLSASMIKRYDEHHQDLTLLKALVRQQLPEKYKEIFFDQSKNGYAGYIDGGASQEEFYKFIKPILEKMDGTEELLVKLNREDLLRKQRTFDNGSIPHQIHLGELHAILRRQEDFYPFLKDNREKIEKILTFRIPYYVGPLARGNSRFAWMTRKSEETITPWNFEEVVDKGASAQSFIERMTNFDKNLPNEKVLPKHSLLYEYFTVYNELTKVKYVTEGMRKPAFLSGEQKKAIVDLLFKTNRKVTVKQLKEDYFKKIECFDSVEISGVEDRFNASLGTYHDLLKIIKDKDFLDNEENEDILEDIVLTLTLFEDREMIEERLKTYAHLFDDKVMKQLKRRRYTGWGRLSRKLINGIRDKQSGKTILDFLKSDGFANRNFMQLIHDDSLTFKEDIQKAQVSGQGDSLHEHIANLAGSPAIKKGILQTVKVVDELVKVMGRHKPENIVIEMARENQTTQKGQKNSRERMKRIEEGIKELGSQILKEHPVENTQLQNEKLYLYYLQNGRDMYVDQELDINRLSDYDVDAIVPQSFLKDDSIDNKVLTRSDKNRGKSDNVPSEEVVKKMKNYWRQLLNAKLITQRKFDNLTKAERGGLSELDKAGFIKRQLVETRQITKHVAQILDSRMNTKYDENDKLIREVKVITLKSKLVSDFRKDFQFYKVREINNYHHAHDAYLNAVVGTALIKKYPKLESEFVYGDYKVYDVRKMIAKSEQEIGKATAKYFFYSNIMNFFKTEITLANGEIRKRPLIETNGETGEIVWDKGRDFATVRKVLSMPQVNIVKKTEVQTGGFSKESILPKRNSDKLIARKKDWDPKKYGGFVSPTVAYSVLVVAKVEKGKSKKLKSVKELLGITIMERSSFEKNPIDFLEAKGYKEVKKDLIIKLPKYSLFELENGRKRMLASAGELQKGNELALPSKYVNFLYLASHYEKLKGSPEDNEQKQLFVEQHKHYLDEIIEQISEFSKRVILADANLDKVLSAYNKHRDKPIREQAENIIHLFTLTNLGAPAAFKYFDTTIDRKQYRSTKEVLDATLIHQSITGLYETRIDLSQLGGD

SEQ ID NO: 30 - protein, 1368 aa, synthetic construct
MDKKYSIGLAIGTNSVGWAVITDEYKVPSKKFKVLGNTDRHSIKKNLIGALLFDSGETAEATRLKRTARRRYTRRKNRICYLQEIFSNEMAKVDDSFFHRLEESFLVEEDKKHERHPIFGNIVDEVAYHEKYPTIYHLRKKLVDSTDKADLRLIYLALAHMIKFRGHFLIEGDLNPDNSDVDKLFIQLVQTYNQLFEENPINASGVDAKAILSARLSKSRRLENLIAQLPGEKKNGLFGNLIALSLGLTPNFKSNFDLAEDAKLQLSKDTYDDDLDNLLAQIGDQYADLFLAAKNLSDAILLSDILRVNTEITKAPLSASMIKRYDEHHQDLTLLKALVRQQLPEKYKEIFFDQSKNGYAGYIDGGASQEEFYKFIKPILEKMDGTEELLVKLNREDLLRKQRTFDNGSIPHQIHLGELHAILRRQEDFYPFLKDNREKIEKILTFRIPYYVGPLARGNSRFAWMTRKSEETITPWNFEEVVDKGASAQSFIERMTNFDKNLPNEKVLPKHSLLYEYFTVYNELTKVKYVTEGMRKPAFLSGEQKKAIVDLLFKTNRKVTVKQLKEDYFKKIECFDSVEISGVEDRFNASLGTYHDLLKIIKDKDFLDNEENEDILEDIVLTLTLFEDREMIEERLKTYAHLFDDKVMKQLKRRRYTGWGRLSRKLINGIRDKQSGKTILDFLKSDGFANRNFMQLIHDDSLTFKEDIQKAQVSGQGDSLHEHIANLAGSPAIKKGILQTVKVVDELVKVMGRHKPENIVIEMARENQTTQKGQKNSRERMKRIEEGIKELGSQILKEHPVENTQLQNEKLYLYYLQNGRDMYVDQELDINRLSDYDVDAIVPQSFLKDDSIDNKVLTRSDKNRGKSDNVPSEEVVKKMKNYWRQLLNAKLITQRKFDNLTKAERGGLSELDKAGFIKRQLVETRQITKHVAQILDSRMNTKYDENDKLIREVKVITLKSKLVSDFRKDFQFYKVREINNYHHAHDAYLNAVVGTALIKKYPKLESEFVYGDYKVYDVRKMIAKSEQEIGKATAKYFFYSNIMNFFKTEITLANGEIRKRPLIETNGETGEIVWDKGRDFATVRKVLSMPQVNIVKKTEVQTGGFSKESILPKRNSDKLIARKKDWDPKKYGGFLWPTVAYSVLVVAKVEKGKSKKLKSVKELLGITIMERSSFEKNPIDFLEAKGYKEVKKDLIIKLPKYSLFELENGRKRMLASAKQLQKGNELALPSKYVNFLYLASHYEKLKGSPEDNEQKQLFVEQHKHYLDEIIEQISEFSKRVILADANLDKVLSAYNKHRDKPIREQAENIIHLFTLTNLGAPAAFKYFDTTIDRKQYRSTKEVLDATLIHQSITGLYETRIDLSQLGGD

SEQ ID NO: 31 - protein, 1368 aa, synthetic construct
MDKKYSIGLAIGTNSVGWAVITDEYKVPSKKFKVLGNTDRHSIKKNLIGALLFDSGETAERTRLKRTARRRYTRRKNRICYLQEIFSNEMAKVDDSFFHRLEESFLVEEDKKHERHPIFGNIVDEVAYHEKYPTIYHLRKKLVDSTDKADLRLIYLALAHMIKFRGHFLIEGDLNPDNSDVDKLFIQLVQTYNQLFEENPINASGVDAKAILSARLSKSRRLENLIAQLPGEKKNGLFGNLIALSLGLTPNFKSNFDLAEDAKLQLSKDTYDDDLDNLLAQIGDQYADLFLAAKNLSDAILLSDILRVNTEITKAPLSASMIKRYDEHHQDLTLLKALVRQQLPEKYKEIFFDQSKNGYAGYIDGGASQEEFYKFIKPILEKMDGTEELLVKLNREDLLRKQRTFDNGSIPHQIHLGELHAILRRQEDFYPFLKDNREKIEKILTFRIPYYVGPLARGNSRFAWMTRKSEETITPWNFEEVVDKGASAQSFIERMTNFDKNLPNEKVLPKHSLLYEYFTVYNELTKVKYVTEGMRKPAFLSGEQKKAIVDLLFKTNRKVTVKQLKEDYFKKIECFDSVEISGVEDRFNASLGTYHDLLKIIKDKDFLDNEENEDILEDIVLTLTLFEDREMIEERLKTYAHLFDDKVMKQLKRRRYTGWGRLSRKLINGIRDKQSGKTILDFLKSDGFANRNFMQLIHDDSLTFKEDIQKAQVSGQGDSLHEHIANLAGSPAIKKGILQTVKVVDELVKVMGRHKPENIVIEMARENQTTQKGQKNSRERMKRIEEGIKELGSQILKEHPVENTQLQNEKLYLYYLQNGRDMYVDQELDINRLSDYDVDAIVPQSFLKDDSIDNKVLTRSDKNRGKSDNVPSEEVVKKMKNYWRQLLNAKLITQRKFDNLTKAERGGLSELDKAGFIKRQLVETRQITKHVAQILDSRMNTKYDENDKLIREVKVITLKSKLVSDFRKDFQFYKVREINNYHHAHDAYLNAVVGTALIKKYPKLESEFVYGDYKVYDVRKMIAKSEQEIGKATAKYFFYSNIMNFFKTEITLANGEIRKRPLIETNGETGEIVWDKGRDFATVRKVLSMPQVNIVKKTEVQTGGFSKESIRPKRNSDKLIARKKDWDPKKYGGFLWPTVAYSVLVVAKVEKGKSKKLKSVKELLGITIMERSSFEKNPIDFLEAKGYKEVKKDLIIKLPKYSLFELENGRKRMLASAKQLQKGNELALPSKYVNFLYLASHYEKLKGSPEDNEQKQLFVEQHKHYLDEIIEQISEFSKRVILADANLDKVLSAYNKHRDKPIREQAENIIHLFTLTRLGAPRAFKYFDTTIDPKQYRSTKEVLDATLIHQSITGLYETRIDLSQLGGD

SEQ ID NO: 32 - protein, 1053 aa, synthetic construct
MKRNYILGLAIGITSVGYGIIDYETRDVIDAGVRLFKEANVENNEGRRSKRGARRLKRRRRHRIQRVKKLLFDYNLLTDHSELSGINPYEARVKGLSQKLSEEEFSAALLHLAKRRGVHNVNEVEEDTGNELSTKEQISRNSKALEEKYVAELQLERLKKDGEVRGSINRFKTSDYVKEAKQLLKVQKAYHQLDQSFIDTYIDLLETRRTYYEGPGEGSPFGWKDIKEWYEMLMGHCTYFPEELRSVKYAYNADLYNALNDLNNLVITRDENEKLEYYEKFQIIENVFKQKKKPTLKQIAKEILVNEEDIKGYRVTSTGKPEFTNLKVYHDIKDITARKEIIENAELLDQIAKILTIYQSSEDIQEELTNLNSELTQEEIEQISNLKGYTGTHNLSLKAINLILDELWHTNDNQIAIFNRLKLVPKKVDLSQQKEIPTTLVDDFILSPVVKRSFIQSIKVINAIIKKYGLPNDIIIELAREKNSKDAQKMINEMQKRNRQTNERIEEIIRTTGKENAKYLIEKIKLHDMQEGKCLYSLEAIPLEDLLNNPFNYEVDHIIPRSVSFDNSFNNKVLVKQEEASKKGNRTPFQYLSSSDSKISYETFKKHILNLAKGKGRISKTKKEYLLEERDINRFSVQKDFINRNLVDTRYATRGLMNLLRSYFRVNNLDVKVKSINGGFTSFLRRKWKFKKERNKGYKHHAEDALIIANADFIFKEWKKLDKAKKVMENQMFEEKQAESMPEIETEQEYKEIFITPHQIKHIKDFKDYKYSHRVDKKPNRKLINDTLYSTRKDDKGNTLIVNNLNGLYDKDNDKLKKLINKSPEKLLMYHHDPQTYQKLKLIMEQYGDEKNPLYKYYEETGNYLTKYSKKDNGPVIKKIKYYGNKLNAHLDITDDYPNSRNKVVKLSLKPYRFDVYLDNGVYKFVTVKNLDVIKKENYYEVNSKCYEEAKKLKKISNQAEFIASFYKNDLIKINGELYRVIGVNNDLLNRIEVNMIDITYREYLENMNDKRPPHIIKTIASKTQSIKKYSTDILGNLYEVKSKKHPQIIKKG

SEQ ID NO: 33 - protein, 176 aa, synthetic construct
SRPGERPFQCRICMRNFSKKFNLLQHTRTHTGEKPFQCRICMRNFSRQDNLNSHLRTHTGSQKPFQCRICMRNFSRSHNLKLHTRTHTGEKPFQCRICMRNFSQSTTLKRHLRTHTGSQKPFQCRICMRNFSRNTNLTRHTRTHTGEKPFQCRICMRNFSIKHNLARHLRTHLRGS

SEQ ID NO: 34 - protein, 176 aa, synthetic construct
SRPGERPFQCRICMRNFSKKFNLLQHTRTHTGEKPFQCRICMRNFSRKDYLISHLRTHTGSQKPFQCRICMRNFSRSHNLKLHTRTHTGEKPFQCRICMRNFSQSTTLKRHLRTHTGSQKPFQCRICMRNFSRQDNLGRHLRTHTGEKPFQCRICMRNFSVVNNLNRHLKTHLRGS

SEQ ID NO: 35 - protein, 176 aa, synthetic construct
SRPGERPFQCRICMRNFSKKFNLLQHTRTHTGEKPFQCRICMRNFSRKDYLISHLRTHTGSQKPFQCRICMRNFSRSHNLRLHTRTHTGEKPFQCRICMRNFSQSTTLKRHLRTHTGSQKPFQCRICMRNFSRQDNLGRHLRTHTGEKPFQCRICMRNFSVVNNLNRHLKTHLRGS

SEQ ID NO: 36 - protein, 176 aa, synthetic construct
SRPGERPFQCRICMRNFSRRHILDRHTRTHTGEKPFQCRICMRNFSRQDNLGRHLRTHTGSQKPFQCRICMRNFSQSTTLKRHLRTHTGEKPFQCRICMRNFSRRDGLAGHLKTHTGSQKPFQCRICMRNFSVHHNLVRHLRTHTGEKPFQCRICMRNFSISHNLARHLKTHLRGS

SEQ ID NO: 37 - protein, 176 aa, synthetic construct
SRPGERPFQCRICMRNFSRREVLENHLRTHTGEKPFQCRICMRNFSRRDNLNRHLKTHTGSQKPFQCRICMRNFSQSTTLKRHLRTHTGEKPFQCRICMRNFSRRDGLAGHLKTHTGSQKPFQCRICMRNFSVHHNLVRHLRTHTGEKPFQCRICMRNFSISHNLARHLKTHLRGS

SEQ ID NO: 38 - protein, 176 aa, synthetic construct
SRPGERPFQCRICMRNFSRRAVLDRHTRTHTGEKPFQCRICMRNFSRQDNLGRHLRTHTGSQKPFQCRICMRNFSQSTTLKRHLRTHTGEKPFQCRICMRNFSRRDGLAGHLKTHTGSQKPFQCRICMRNFSVHHNLVRHLRTHTGEKPFQCRICMRNFSISHNLARHLKTHLRGS

SEQ ID NO: 39 - protein, 176 aa, synthetic construct
SRPGERPFQCRICMRNFSRQEHLVRHLRTHTGEKPFQCRICMRNFSEGGNLMRHLKTHTGSQKPFQCRICMRNFSSDRRDLDHTRTHTGEKPFQCRICMRNFSSFQSYLEHLRTHTGSQKPFQCRICMRNFSRPNHLAIHTRTHTGEKPFQCRICMRNFSQSPHLKRHLRTHLRGS

SEQ ID NO: 40 - protein, 176 aa, synthetic construct
SRPGERPFQCRICMRNFSRREHLVRHLRTHTGEKPFQCRICMRNFSDPSNLQRHLKTHTGSQKPFQCRICMRNFSSDRRDLDHTRTHTGEKPFQCRICMRNFSSFQSYLEHLRTHTGSQKPFQCRICMRNFSRPNHLAIHTRTHTGEKPFQCRICMRNFSQSPHLKRHLRTHLRGS

SEQ ID NO: 41 - protein, 176 aa, synthetic construct
SRPGERPFQCRICMRNFSRREHLVRHLRTHTGEKPFQCRICMRNFSDMGNLGRHLKTHTGSQKPFQCRICMRNFSSDRRDLDHTRTHTGEKPFQCRICMRNFSSFQSYLEHLRTHTGSQKPFQCRICMRNFSRPNHLAIHTRTHTGEKPFQCRICMRNFSQSPHLKRHLRTHLRGS

SEQ ID NO: 42 - protein, 179 aa, synthetic construct
SRPGERPFQCRICMRNFSKKDHLHRHTRTHTGEKPFQCRICMRNFSQKEILTRHLRTHTGSQKPFQCRICMRNFSQSAHLKRHLRTHTGEKPFQCRICMRNFSETGSLRRHLKTHTGGGGSQKPFQCRICMRNFSQSHSLKSHLRTHTGEKPFQCRICMRNFSESGHLKRHLKTHLRGS

SEQ ID NO: 43 - protein, 179 aa, synthetic construct
SRPGERPFQCRICMRNFSKKDHLHRHTRTHTGEKPFQCRICMRNFSQKEILTRHLRTHTGSQKPFQCRICMRNFSQSAHLKRHLRTHTGEKPFQCRICMRNFSDRTPLNRHLKTHTGGGGSQKPFQCRICMRNFSQSHSLKSHLRTHTGEKPFQCRICMRNFSESGHLKRHLKTHLRGS

SEQ ID NO: 44 - protein, 179 aa, synthetic construct
SRPGERPFQCRICMRNFSKTDHLARHTRTHTGEKPFQCRICMRNFSQKEILTRHLRTHTGSQKPFQCRICMRNFSQSAHLKRHLRTHTGEKPFQCRICMRNFSETGSLRRHLKTHTGGGGSQKPFQCRICMRNFSQKHHLVTHLRTHTGEKPFQCRICMRNFSENSKLRRHLKTHLRGS

SEQ ID NO: 45 - protein, 179 aa, synthetic construct
SRPGERPFQCRICMRNFSQAGNLVRHLRTHTGEKPFQCRICMRNFSQNSHLRRHLKTHTGGGGSQKPFQCRICMRNFSDLSTLRRHTRTHTGEKPFQCRICMRNFSQNEHLKVHLRTHTGSQKPFQCRICMRNFSGGTALRMHTRTHTGEKPFQCRICMRNFSQRSSLVRHLRTHLRGS

SEQ ID NO: 46 - protein, 179 aa, synthetic construct
SRPGERPFQCRICMRNFSQRGNLQRHLRTHTGEKPFQCRICMRNFSQTTHLSRHLKTHTGGGGSQKPFQCRICMRNFSDGSTLRRHTRTHTGEKPFQCRICMRNFSQKTHLAVHLRTHTGSQKPFQCRICMRNFSGGTALRMHTRTHTGEKPFQCRICMRNFSQRSSLVRHLRTHLRGS

SEQ ID NO: 47 - protein, 179 aa, synthetic construct
SRPGERPFQCRICMRNFSQRGNLQRHLRTHTGEKPFQCRICMRNFSQTTHLSRHLKTHTGGGGSQKPFQCRICMRNFSDLSTLRRHTRTHTGEKPFQCRICMRNFSQNEHLKVHLRTHTGSQKPFQCRICMRNFSGGSALSMHTRTHTGEKPFQCRICMRNFSQRSSLVRHLRTHLRGS

SEQ ID NO: 48 - protein, 179 aa, synthetic construct
SRPGERPFQCRICMRNFSDRGNLTRHLRTHTGEKPFQCRICMRNFSQARSLRAHLKTHTGGGGSQKPFQCRICMRNFSEKASLIKHTRTHTGEKPFQCRICMRNFSDHSSLKRHLRTHTGSQKPFQCRICMRNFSRRFILSRHTRTHTGEKPFQCRICMRNFSRNDSLKCHLRTHLRGS

SEQ ID NO: 49 - protein, 179 aa, synthetic construct
SRPGERPFQCRICMRNFSDRGNLTRHLRTHTGEKPFQCRICMRNFSQARSLRAHLKTHTGGGGSQKPFQCRICMRNFSDKSSLRKHTRTHTGEKPFQCRICMRNFSDHSSLKRHLRTHTGSQKPFQCRICMRNFSRNFILQRHTRTHTGEKPFQCRICMRNFSRNDTLIIHLRTHLRGS

SEQ ID NO: 50 - protein, 179 aa, synthetic construct
SRPGERPFQCRICMRNFSDRGNLTRHLRTHTGEKPFQCRICMRNFSQARSLRAHLKTHTGGGGSQKPFQCRICMRNFSCNGSLKKHTRTHTGEKPFQCRICMRNFSDHSSLKRHLRTHTGSQKPFQCRICMRNFSRNFILQRHTRTHTGEKPFQCRICMRNFSRNDTLIIHLRTHLRGS

SEQ ID NO: 51 - protein, 179 aa, synthetic construct
SRPGERPFQCRICMRNFSRTDTLARHLRTHTGEKPFQCRICMRNFSRTDSLPRHLKTHTGGGGSQKPFQCRICMRNFSDHSSLKRHLRTHTGEKPFQCRICMRNFSQPHGLAHHLKTHTGSQKPFQCRICMRNFSQSAHLKRHLRTHTGEKPFQCRICMRNFSVGNSLSRHLKTHLRGS

SEQ ID NO: 52 - protein, 179 aa, synthetic construct
SRPGERPFQCRICMRNFSRTDTLARHLRTHTGEKPFQCRICMRNFSRTDSLPRHLKTHTGGGGSQKPFQCRICMRNFSDHSSLKRHLRTHTGEKPFQCRICMRNFSQPHGLRHHLKTHTGSQKPFQCRICMRNFSQSAHLKRHLRTHTGEKPFQCRICMRNFSVGNSLSRHLKTHLRGS

SEQ ID NO: 53 - protein, 179 aa, synthetic construct
SRPGERPFQCRICMRNFSRTDTLARHLRTHTGEKPFQCRICMRNFSRLDMLARHLKTHTGGGGSQKPFQCRICMRNFSDHSSLKRHLRTHTGEKPFQCRICMRNFSQPHGLSTHLKTHTGSQKPFQCRICMRNFSQQAHLVRHTRTHTGEKPFQCRICMRNFSVHESLKRHLRTHLRGS

SEQ ID NO: 54 - protein, 176 aa, synthetic construct
SRPGERPFQCRICMRNFSRADNLGRHLRTHTGEKPFQCRICMRNFSRNTHLSYHLKTHTGSQKPFQCRICMRNFSRGDGLRRHLRTHTGEKPFQCRICMRNFSRRDNLNRHLKTHTGSQKPFQCRICMRNFSRARNLTLHTRTHTGEKPFQCRICMRNFSDPSSLKRHLRTHLRGS

SEQ ID NO: 55 - protein, 176 aa, synthetic construct
SRPGERPFQCRICMRNFSRADNLGRHLRTHTGEKPFQCRICMRNFSRNTHLSYHLKTHTGSQKPFQCRICMRNFSRKLGLLRHTRTHTGEKPFQCRICMRNFSRQDNLGRHLRTHTGSQKPFQCRICMRNFSRARNLTLHTRTHTGEKPFQCRICMRNFSDPSSLKRHLRTHLRGS

SEQ ID NO: 56 - protein, 176 aa, synthetic construct
SRPGERPFQCRICMRNFSRADNLGRHLRTHTGEKPFQCRICMRNFSRNTHLSYHLKTHTGSQKPFQCRICMRNFSRKLGLLRHTRTHTGEKPFQCRICMRNFSRQDNLGRHLRTHTGSQKPFQCRICMRNFSRRRNLQLHTRTHTGEKPFQCRICMRNFSDHSSLKRHLRTHLRGS

SEQ ID NO: 57 - protein, 179 aa, synthetic construct
SRPGERPFQCRICMRNFSQQSSLLRHTRTHTGEKPFQCRICMRNFSRREHLVRHLRTHTGSQKPFQCRICMRNFSGLTALRTHTRTHTGEKPFQCRICMRNFSERAKLIRHLRTHTGGGGSQKPFQCRICMRNFSAKRDLDRHTRTHTGEKPFQCRICMRNFSVNSSLTRHLRTHLRGS

SEQ ID NO: 58 - protein, 179 aa, synthetic construct
SRPGERPFQCRICMRNFSQQSSLLRHTRTHTGEKPFQCRICMRNFSRREHLVRHLRTHTGSQKPFQCRICMRNFSGLTALRTHTRTHTGEKPFQCRICMRNFSERAKLIRHLRTHTGGGGSQKPFQCRICMRNFSLRKDLVRHTRTHTGEKPFQCRICMRNFSVRHSLTRHLRTHLRGS

SEQ ID NO: 59 - protein, 179 aa, synthetic construct
SRPGERPFQCRICMRNFSQASALSRHTRTHTGEKPFQCRICMRNFSRREHLVRHLRTHTGSQKPFQCRICMRNFSGLTALRTHTRTHTGEKPFQCRICMRNFSERAKLIRHLRTHTGGGGSQKPFQCRICMRNFSAKRDLDRHTRTHTGEKPFQCRICMRNFSVNSSLTRHLRTHLRGS

SEQ ID NO: 60 - protein, 179 aa, synthetic construct
SRPGERPFQCRICMRNFSRGRNLEMHTRTHTGEKPFQCRICMRNFSDSSVLRRHLRTHTGGGGSQKPFQCRICMRNFSQNANLKRHTRTHTGEKPFQCRICMRNFSQKHHLAVHLRTHTGSQKPFQCRICMRNFSQRSNLARHLRTHTGEKPFQCRICMRNFSQKVHLEAHLKTHLRGS

SEQ ID NO: 61 - protein, 179 aa, synthetic construct
SRPGERPFQCRICMRNFSRRRNLDVHTRTHTGEKPFQCRICMRNFSDSSVLRRHLRTHTGGGGSQKPFQCRICMRNFSQNANLKRHTRTHTGEKPFQCRICMRNFSQKHHLAVHLRTHTGSQKPFQCRICMRNFSQRSNLARHLRTHTGEKPFQCRICMRNFSQKVHLEAHLKTHLRGS

SEQ ID NO: 62 - protein, 179 aa, synthetic construct
SRPGERPFQCRICMRNFSRGRNLAIHTRTHTGEKPFQCRICMRNFSDSSVLRRHLRTHTGGGGSQKPFQCRICMRNFSLKSNLHRHTRTHTGEKPFQCRICMRNFSLKQHLVVHLRTHTGSQKPFQCRICMRNFSLKTNLARHTRTHTGEKPFQCRICMRNFSQKCHLKAHLRTHLRGS

SEQ ID NO: 63 - protein, 179 aa, synthetic construct
SRPGERPFQCRICMRNFSDGSNLRRHLRTHTGEKPFQCRICMRNFSRIDNLDGHLKTHTGSQKPFQCRICMRNFSQRRYLVEHTRTHTGEKPFQCRICMRNFSQQTNLARHLRTHTGGGGSQKPFQCRICMRNFSQRSDLTRHLRTHTGEKPFQCRICMRNFSRGDNLNRHLKTHLRGS

SEQ ID NO: 64 - protein, 179 aa, synthetic construct
SRPGERPFQCRICMRNFSDPSNLQRHLRTHTGEKPFQCRICMRNFSRRDNLPKHLKTHTGSQKPFQCRICMRNFSTTFNLRVHTRTHTGEKPFQCRICMRNFSQTQNLTRHLRTHTGGGGSQKPFQCRICMRNFSHKETLNRHLRTHTGEKPFQCRICMRNFSREDNLGRHLKTHLRGS

SEQ ID NO: 65 - protein, 179 aa, synthetic construct
SRPGERPFQCRICMRNFSDPSNLQRHLRTHTGEKPFQCRICMRNFSRRDNLPKHLKTHTGSQKPFQCRICMRNFSQRRYLVEHTRTHTGEKPFQCRICMRNFSQQTNLARHLRTHTGGGGSQKPFQCRICMRNFSQRSDLTRHLRTHTGEKPFQCRICMRNFSRGDNLNRHLKTHLRGS

SEQ ID NO: 66 - protein, 176 aa, synthetic construct
SRPGERPFQCRICMRNFSQQTNLTRHLRTHTGEKPFQCRICMRNFSANRTLVHHLKTHTGSQKPFQCRICMRNFSEEANLRRHTRTHTGEKPFQCRICMRNFSRGEHLTRHLRTHTGSQKPFQCRICMRNFSTNSSLTRHLRTHTGEKPFQCRICMRNFSRIDNLIRHLKTHLRGS

SEQ ID NO: 67 - protein, 176 aa, synthetic construct
SRPGERPFQCRICMRNFSQQTNLTRHLRTHTGEKPFQCRICMRNFSANRTLVHHLKTHTGSQKPFQCRICMRNFSEEANLRRHTRTHTGEKPFQCRICMRNFSRREHLVRHLRTHTGSQKPFQCRICMRNFSMTSSLRRHTRTHTGEKPFQCRICMRNFSRQDNLGRHLRTHLRGS

SEQ ID NO: 68 - protein, 176 aa, synthetic construct
SRPGERPFQCRICMRNFSQQTNLTRHLRTHTGEKPFQCRICMRNFSANRTLVHHLKTHTGSQKPFQCRICMRNFSEEANLRRHTRTHTGEKPFQCRICMRNFSRGEHLTRHLRTHTGSQKPFQCRICMRNFSMTSSLRRHTRTHTGEKPFQCRICMRNFSRQDNLGRHLRTHLRGS

SEQ ID NO: 69 - protein, 176 aa, synthetic construct
SRPGERPFQCRICMRNFSRATHLTRHTRTHTGEKPFQCRICMRNFSRADVLKGHLRTHTGSQKPFQCRICMRNFSQRSSLVRHLRTHTGEKPFQCRICMRNFSRKDALHVHLKTHTGSQKPFQCRICMRNFSVHHNLVRHLRTHTGEKPFQCRICMRNFSISHNLARHLKTHLRGS

SEQ ID NO: 70 - protein, 176 aa, synthetic construct
SRPGERPFQCRICMRNFSRATHLTRHTRTHTGEKPFQCRICMRNFSRADVLKGHLRTHTGSQKPFQCRICMRNFSQSSSLVRHLRTHTGEKPFQCRICMRNFSRKERLATHLKTHTGSQKPFQCRICMRNFSVRHNLTRHLRTHTGEKPFQCRICMRNFSISHNLARHLKTHLRGS

SEQ ID NO: 71 - protein, 176 aa, synthetic construct
SRPGERPFQCRICMRNFSKKDHLHRHTRTHTGEKPFQCRICMRNFSRKESLTVHLRTHTGSQKPFQCRICMRNFSQSSSLVRHLRTHTGEKPFQCRICMRNFSRKERLATHLKTHTGSQKPFQCRICMRNFSVHHNLVRHLRTHTGEKPFQCRICMRNFSISHNLARHLKTHLRGS

SEQ ID NO: 72 - protein, 179 aa, synthetic construct
SRPGERPFQCRICMRNFSRVDHLHRHLRTHTGEKPFQCRICMRNFSRREHLSGHLKTHTGGGGSQKPFQCRICMRNFSQSSSLVRHLRTHTGEKPFQCRICMRNFSRKERLATHLKTHTGSQKPFQCRICMRNFSVAHNLTRHLRTHTGEKPFQCRICMRNFSISHNLARHLKTHLRGS

SEQ ID NO: 73 - protein, 179 aa, synthetic construct
SRPGERPFQCRICMRNFSRKHHLGRHTRTHTGEKPFQCRICMRNFSRREHLTIHLRTHTGGGGSQKPFQCRICMRNFSQSSSLVRHLRTHTGEKPFQCRICMRNFSRKERLATHLKTHTGSQKPFQCRICMRNFSVAHNLTRHLRTHTGEKPFQCRICMRNFSISHNLARHLKTHLRGS

SEQ ID NO: 74 - protein, 179 aa, synthetic construct
SRPGERPFQCRICMRNFSRVDHLHRHLRTHTGEKPFQCRICMRNFSRSDHLSLHLKTHTGGGGSQKPFQCRICMRNFSQSSSLVRHLRTHTGEKPFQCRICMRNFSRKERLATHLKTHTGSQKPFQCRICMRNFSVAHNLTRHLRTHTGEKPFQCRICMRNFSISHNLARHLKTHLRGS

SEQ ID NO: 75 - protein, 176 aa, synthetic construct
SRPGERPFQCRICMRNFSKTDHLARHTRTHTGEKPFQCRICMRNFSQKEILTRHLRTHTGSQKPFQCRICMRNFSQSAHLKRHLRTHTGEKPFQCRICMRNFSETGSLRRHLKTHTGSQKPFQCRICMRNFSQSSSLVRHLRTHTGEKPFQCRICMRNFSQTNTLGRHLKTHLRGS

SEQ ID NO: 76 - protein, 176 aa, synthetic construct
SRPGERPFQCRICMRNFSKKDHLHRHTRTHTGEKPFQCRICMRNFSQKEILTRHLRTHTGSQKPFQCRICMRNFSQSAHLKRHLRTHTGEKPFQCRICMRNFSETGSLRRHLKTHTGSQKPFQCRICMRNFSQSSSLVRHLRTHTGEKPFQCRICMRNFSQGGTLRRHLKTHLRGS

SEQ ID NO: 77 - protein, 176 aa, synthetic construct
SRPGERPFQCRICMRNFSKKDHLHRHTRTHTGEKPFQCRICMRNFSQKEILTRHLRTHTGSQKPFQCRICMRNFSQSAHLKRHLRTHTGEKPFQCRICMRNFSDPTSLNRHLKTHTGSQKPFQCRICMRNFSQSSSLVRHLRTHTGEKPFQCRICMRNFSQTNTLGRHLKTHLRGS

SEQ ID NO: 78 - protein, 176 aa, synthetic construct
SRPGERPFQCRICMRNFSQQTNLTRHLRTHTGEKPFQCRICMRNFSVGGNLARHLKTHTGSQKPFQCRICMRNFSKRYNLYQHTRTHTGEKPFQCRICMRNFSRQDNLNTHLRTHTGSQKPFQCRICMRNFSRSHNLKLHTRTHTGEKPFQCRICMRNFSQSTTLKRHLRTHLRGS

SEQ ID NO: 79 - protein, 176 aa, synthetic construct
SRPGERPFQCRICMRNFSQQTNLTRHLRTHTGEKPFQCRICMRNFSVGGNLSRHLKTHTGSQKPFQCRICMRNFSKRYNLYQHTRTHTGEKPFQCRICMRNFSRQDNLNTHLRTHTGSQKPFQCRICMRNFSRSHNLRLHTRTHTGEKPFQCRICMRNFSQSTTLKRHLRTHLRGS

SEQ ID NO: 80 - protein, 176 aa, synthetic construct
SRPGERPFQCRICMRNFSQQTNLTRHLRTHTGEKPFQCRICMRNFSVGGNLSRHLKTHTGSQKPFQCRICMRNFSKKFNLLQHTRTHTGEKPFQCRICMRNFSRRDNLKSHLRTHTGSQKPFQCRICMRNFSRSHNLKLHTRTHTGEKPFQCRICMRNFSQSTTLKRHLRTHLRGS

SEQ ID NO: 81 - protein, 179 aa, synthetic construct
SRPGERPFQCRICMRNFSDKSSLRKHTRTHTGEKPFQCRICMRNFSDHSSLKRHLRTHTGSQKPFQCRICMRNFSRNFILQRHTRTHTGEKPFQCRICMRNFSRNDTLIIHLRTHTGGGGSQKPFQCRICMRNFSTSTLLKRHTRTHTGEKPFQCRICMRNFSLKEHLTRHLRTHLRGS

SEQ ID NO: 82 - protein, 179 aa, synthetic construct
SRPGERPFQCRICMRNFSCNGSLKKHTRTHTGEKPFQCRICMRNFSDHSSLKRHLRTHTGSQKPFQCRICMRNFSRNFILARHTRTHTGEKPFQCRICMRNFSRQDILVVHLRTHTGGGGSQKPFQCRICMRNFSHKSSLTRHLRTHTGEKPFQCRICMRNFSESGHLKRHLKTHLRGS

SEQ ID NO: 83 - protein, 179 aa, synthetic construct
SRPGERPFQCRICMRNFSCNGSLKKHTRTHTGEKPFQCRICMRNFSDHSSLKRHLRTHTGSQKPFQCRICMRNFSRNFILARHTRTHTGEKPFQCRICMRNFSRQDILVVHLRTHTGGGGSQKPFQCRICMRNFSTSTLLKRHTRTHTGEKPFQCRICMRNFSLKEHLTRHLRTHLRGS

SEQ ID NO: 84 - protein, 176 aa, synthetic construct
SRPGERPFQCRICMRNFSTNNNLARHTRTHTGEKPFQCRICMRNFSRTDSLTLHLRTHTGSQKPFQCRICMRNFSQREHLTTHLRTHTGEKPFQCRICMRNFSRRDNLNRHLKTHTGSQKPFQCRICMRNFSRRQKLTIHTRTHTGEKPFQCRICMRNFSHKSSLTRHLRTHLRGS

SEQ ID NO: 85 - protein, 176 aa, synthetic construct
SRPGERPFQCRICMRNFSTNNNLARHTRTHTGEKPFQCRICMRNFSRTDSLTLHLRTHTGSQKPFQCRICMRNFSQREHLTTHLRTHTGEKPFQCRICMRNFSRGDNLKRHLKTHTGSQKPFQCRICMRNFSRRQKLTIHTRTHTGEKPFQCRICMRNFSHKSSLTRHLRTHLRGS

SEQ ID NO: 86 - protein, 176 aa, synthetic construct
SRPGERPFQCRICMRNFSTNNNLARHTRTHTGEKPFQCRICMRNFSRTDSLTLHLRTHTGSQKPFQCRICMRNFSQREHLNGHLRTHTGEKPFQCRICMRNFSRGDNLARHLKTHTGSQKPFQCRICMRNFSRRQKLTIHTRTHTGEKPFQCRICMRNFSHKSSLTRHLRTHLRGS

SEQ ID NO: 87 - protein, 179 aa, synthetic construct
SRPGERPFQCRICMRNFSQQTNLTRHLRTHTGEKPFQCRICMRNFSANRTLVHHLKTHTGSQKPFQCRICMRNFSDPANLRRHTRTHTGEKPFQCRICMRNFSRQEHLVRHLRTHTGGGGSQKPFQCRICMRNFSMKHHLGRHLRTHTGEKPFQCRICMRNFSQNSHLRRHLKTHLRGS

SEQ ID NO: 88 - protein, 179 aa, synthetic construct
SRPGERPFQCRICMRNFSQQTNLTRHLRTHTGEKPFQCRICMRNFSANRTLVHHLKTHTGSQKPFQCRICMRNFSEEANLRRHTRTHTGEKPFQCRICMRNFSRREHLVRHLRTHTGGGGSQKPFQCRICMRNFSMKHHLGRHLRTHTGEKPFQCRICMRNFSQNSHLRRHLKTHLRGS

SEQ ID NO: 89 - protein, 179 aa, synthetic construct
SRPGERPFQCRICMRNFSQQTNLTRHLRTHTGEKPFQCRICMRNFSANRTLVHHLKTHTGSQKPFQCRICMRNFSDPANLRRHTRTHTGEKPFQCRICMRNFSRQEHLVRHLRTHTGGGGSQKPFQCRICMRNFSLKQHLVRHLRTHTGEKPFQCRICMRNFSQGGHLARHLKTHLRGS

SEQ ID NO: 90 - protein, 179 aa, synthetic construct
SRPGERPFQCRICMRNFSRNTHLARHTRTHTGEKPFQCRICMRNFSRADVLKGHLRTHTGSQKPFQCRICMRNFSQRSSLVRHLRTHTGEKPFQCRICMRNFSRKDALHVHLKTHTGGGGSQKPFQCRICMRNFSQNEHLKVHLRTHTGEKPFQCRICMRNFSQNSHLRRHLKTHLRGS

SEQ ID NO: 91 - protein, 179 aa, synthetic construct
SRPGERPFQCRICMRNFSRNTHLARHTRTHTGEKPFQCRICMRNFSRADVLKGHLRTHTGSQKPFQCRICMRNFSQSSSLVRHLRTHTGEKPFQCRICMRNFSRKERLATHLKTHTGGGGSQKPFQCRICMRNFSQKTHLAVHLRTHTGEKPFQCRICMRNFSQGGHLKRHLKTHLRGS

SEQ ID NO: 92 - protein, 179 aa, synthetic construct
SRPGERPFQCRICMRNFSRNTHLARHTRTHTGEKPFQCRICMRNFSRADVLKGHLRTHTGSQKPFQCRICMRNFSQSSSLVRHLRTHTGEKPFQCRICMRNFSRKERLATHLKTHTGGGGSQKPFQCRICMRNFSQKTHLAVHLRTHTGEKPFQCRICMRNFSQNSHLRRHLKTHLRGS

SEQ ID NO: 93 - protein, 176 aa, synthetic construct
SRPGERPFQCRICMRNFSHKSSLTRHLRTHTGEKPFQCRICMRNFSESGHLKRHLKTHTGSQKPFQCRICMRNFSRRRNLTLHTRTHTGEKPFQCRICMRNFSDRSSLKRHLRTHTGSQKPFQCRICMRNFSQPHSLAVHLRTHTGEKPFQCRICMRNFSQKPHLSRHLKTHLRGS

SEQ ID NO: 94 - protein, 176 aa, synthetic construct
SRPGERPFQCRICMRNFSHKSSLTRHLRTHTGEKPFQCRICMRNFSEGGHLKRHLKTHTGSQKPFQCRICMRNFSRRRNLQLHTRTHTGEKPFQCRICMRNFSDHSSLKRHLRTHTGSQKPFQCRICMRNFSRRQHLQYHTRTHTGEKPFQCRICMRNFSQSAHLKRHLRTHLRGS

SEQ ID NO: 95 - protein, 176 aa, synthetic construct
SRPGERPFQCRICMRNFSHKSSLTRHLRTHTGEKPFQCRICMRNFSEGGHLKRHLKTHTGSQKPFQCRICMRNFSRRRNLTLHTRTHTGEKPFQCRICMRNFSDRSSLKRHLRTHTGSQKPFQCRICMRNFSRRQHLQYHTRTHTGEKPFQCRICMRNFSQSAHLKRHLRTHLRGS

SEQ ID NO: 96 - protein, 179 aa, synthetic construct
SRPGERPFQCRICMRNFSGHTALRNHTRTHTGEKPFQCRICMRNFSQSGTLHRHLRTHTGGGGSQKPFQCRICMRNFSDHSSLKRHLRTHTGEKPFQCRICMRNFSAMRSLMGHLKTHTGSQKPFQCRICMRNFSRRSRLVRHTRTHTGEKPFQCRICMRNFSRGEHLTRHLRTHLRGS

SEQ ID NO: 97 - protein, 179 aa, synthetic construct
SRPGERPFQCRICMRNFSGHTALRNHTRTHTGEKPFQCRICMRNFSQSTTLKRHLRTHTGGGGSQKPFQCRICMRNFSDHSSLKRHLRTHTGEKPFQCRICMRNFSQQRSLVGHLKTHTGSQKPFQCRICMRNFSEAHHLSRHLRTHTGEKPFQCRICMRNFSRTEHLARHLKTHLRGS

SEQ ID NO: 98 - protein, 179 aa, synthetic construct
SRPGERPFQCRICMRNFSGHTALRNHTRTHTGEKPFQCRICMRNFSQSTTLKRHLRTHTGGGGSQKPFQCRICMRNFSDHSSLKRHLRTHTGEKPFQCRICMRNFSAMRSLMGHLKTHTGSQKPFQCRICMRNFSRQSRLQRHTRTHTGEKPFQCRICMRNFSRREHLVRHLRTHLRGS

SEQ ID NO: 99 - protein, 179 aa, synthetic construct
SRPGERPFQCRICMRNFSQGETLKRHLRTHTGEKPFQCRICMRNFSRADNLRRHLKTHTGSQKPFQCRICMRNFSDKANLTRHLRTHTGEKPFQCRICMRNFSDQGNLIRHLKTHTGGGGSQKPFQCRICMRNFSHRHVLINHTRTHTGEKPFQCRICMRNFSTNSSLTRHLRTHLRGS

SEQ ID NO: 100 - protein, 179 aa, synthetic construct
SRPGERPFQCRICMRNFSQGETLKRHLRTHTGEKPFQCRICMRNFSRADNLRRHLKTHTGSQKPFQCRICMRNFSDSSNLRRHLRTHTGEKPFQCRICMRNFSDQGNLIRHLKTHTGGGGSQKPFQCRICMRNFSHKSSLTRHLRTHTGEKPFQCRICMRNFSIRTSLKRHLKTHLRGS

SEQ ID NO: 101 - protein, 179 aa, synthetic construct
SRPGERPFQCRICMRNFSQGETLKRHLRTHTGEKPFQCRICMRNFSRADNLRRHLKTHTGSQKPFQCRICMRNFSEQGNLLRHLRTHTGEKPFQCRICMRNFSDGGNLGRHLKTHTGGGGSQKPFQCRICMRNFSHRHVLINHTRTHTGEKPFQCRICMRNFSTNSSLTRHLRTHLRGS

SEQ ID NO: 102 - DNA, 18 bp, Hepatitis B virus
  source 1..18: mol_type = genomic DNA
gatgaggcatagcagcag

SEQ ID NO: 103 - DNA, 18 bp, Hepatitis B virus
  source 1..18: mol_type = genomic DNA
gatgattaggcagaggtg

SEQ ID NO: 104 - DNA, 18 bp, Hepatitis B virus
  source 1..18: mol_type = genomic DNA
ggattcagcgccgacggg

SEQ ID NO: 105 - DNA, 19 bp, Hepatitis B virus
  source 1..19: mol_type = genomic DNA
ggcagtagtcggaacaggg

SEQ ID NO: 106 - DNA, 19 bp, Hepatitis B virus
  source 1..19: mol_type = genomic DNA
gtaaactgagccaggagaa

SEQ ID NO: 107 - DNA, 19 bp, Hepatitis B virus
  source 1..19: mol_type = genomic DNA
acggtggtctccatgcgac

SEQ ID NO: 108 - DNA, 19 bp, Hepatitis B virus
  source 1..19: mol_type = genomic DNA
gctggatgtgtctgcggcg

SEQ ID NO: 109 - DNA, 18 bp, Hepatitis B virus
  source 1..18: mol_type = genomic DNA
gtctgcgaggcgagggag

SEQ ID NO: 110 - DNA, 19 bp, Hepatitis B virus
  source 1..19: mol_type = genomic DNA
gttgccgggcaacggggta

SEQ ID NO: 111 - DNA, 19 bp, Hepatitis B virus
  source 1..19: mol_type = genomic DNA
cgagaaagtgaaagcctgc

SEQ ID NO: 112 - DNA, 19 bp, Hepatitis B virus
  source 1..19: mol_type = genomic DNA
gaggcttgaacagtaggac

SEQ ID NO: 113 - DNA, 18 bp, Hepatitis B virus
  source 1..18: mol_type = genomic DNA
gaggttggggactgcgaa

SEQ ID NO: 114 - DNA, 18 bp, Hepatitis B virus
  source 1..18: mol_type = genomic DNA
gatgatgtggtattgggg

SEQ ID NO: 115 - DNA, 19 bp, Hepatitis B virus
  source 1..19: mol_type = genomic DNA
gatgatgtggtattggggg

SEQ ID NO: 116 - DNA, 18 bp, Hepatitis B virus
  source 1..18: mol_type = genomic DNA
gcagtagtcggaacaggg

SEQ ID NO: 117 - DNA, 18 bp, Hepatitis B virus
  source 1..18: mol_type = genomic DNA
gcatagcagcaggatgaa

SEQ ID NO: 118 - DNA, 19 bp, Hepatitis B virus
  source 1..19: mol_type = genomic DNA
ggcgttcacggtggtctcc

SEQ ID NO: 119 - DNA, 18 bp, Hepatitis B virus
  source 1..18: mol_type = genomic DNA
gttggtgagtgattggag

SEQ ID NO: 120 - DNA, 19 bp, Hepatitis B virus
  source 1..19: mol_type = genomic DNA
ggaggttggggactgcgaa

SEQ ID NO: 121 - DNA, 19 bp, Hepatitis B virus
  source 1..19: mol_type = genomic DNA
ggatgatgtggtattgggg

SEQ ID NO: 122 - DNA, 18 bp, Hepatitis B virus
  source 1..18: mol_type = genomic DNA
ggatgtgtctgcggcgtt

SEQ ID NO: 123 - DNA, 19 bp, Hepatitis B virus
  source 1..19: mol_type = genomic DNA
gggggttgcgtcagcaaac

SEQ ID NO: 124 - DNA, 19 bp, Hepatitis B virus
  source 1..19: mol_type = genomic DNA
gttgttagacgacgaggca

SEQ ID NO: 125 - protein, 7 aa, synthetic construct
KKFNLLQ

SEQ ID NO: 126 - protein, 7 aa, synthetic construct
RRHILDR

SEQ ID NO: 127 - protein, 7 aa, synthetic construct
RREVLEN

SEQ ID NO: 128 - protein, 7 aa, synthetic construct
RRAVLDR

SEQ ID NO: 129 - protein, 7 aa, synthetic construct
RQEHLVR

SEQ ID NO: 130 - protein, 7 aa, synthetic construct
RREHLVR

SEQ ID NO: 131 - protein, 7 aa, synthetic construct
KKDHLHR

SEQ ID NO: 132 - protein, 7 aa, synthetic construct
KTDHLAR

SEQ ID NO: 133 - protein, 7 aa, synthetic construct
QAGNLVR

SEQ ID NO: 134 - protein, 7 aa, synthetic construct
QRGNLQR

SEQ ID NO: 135 - protein, 7 aa, synthetic construct
DRGNLTR

SEQ ID NO: 136 - protein, 7 aa, synthetic construct
RTDTLAR

SEQ ID NO: 137 - protein, 7 aa, synthetic construct
RADNLGR

SEQ ID NO: 138 - protein, 7 aa, synthetic construct
QQSSLLR

SEQ ID NO: 139 - protein, 7 aa, synthetic construct
QASALSR

SEQ ID NO: 140 - protein, 7 aa, synthetic construct
RGRNLEM

SEQ ID NO: 141 - protein, 7 aa, synthetic construct
RRRNLDV

SEQ ID NO: 142 - protein, 7 aa, synthetic construct
RGRNLAI

SEQ ID NO: 143 - protein, 7 aa, synthetic construct
DGSNLRR

SEQ ID NO: 144 - protein, 7 aa, synthetic construct
DPSNLQR

SEQ ID NO: 145 - protein, 7 aa, synthetic construct
QQTNLTR

SEQ ID NO: 146 - protein, 7 aa, synthetic construct
RATHLTR

SEQ ID NO: 147 - protein, 7 aa, synthetic construct
RVDHLHR

SEQ ID NO: 148 - protein, 7 aa, synthetic construct
RKHHLGR

SEQ ID NO: 149 - protein, 7 aa, synthetic construct
DKSSLRK

SEQ ID NO: 150 - protein, 7 aa, synthetic construct
CNGSLKK

SEQ ID NO: 151 - protein, 7 aa, synthetic construct
TNNNLAR

SEQ ID NO: 152 - protein, 7 aa, synthetic construct
RNTHLAR

SEQ ID NO: 153 - protein, 7 aa, synthetic construct
HKSSLTR

SEQ ID NO: 154 - protein, 7 aa, synthetic construct
GHTALRN

SEQ ID NO: 155 - protein, 7 aa, synthetic construct
QGETLKR

SEQ ID NO: 156 - protein, 7 aa, synthetic construct
RQDNLNS

SEQ ID NO: 157 - protein, 7 aa, synthetic construct
RKDYLIS

SEQ ID NO: 158 - protein, 7 aa, synthetic construct
RQDNLGR

SEQ ID NO: 159 - protein, 7 aa, synthetic construct
RRDNLNR

SEQ ID NO: 160 - protein, 7 aa, synthetic construct
EGGNLMR

SEQ ID NO: 161 - protein, 7 aa, synthetic construct
DPSNLQR

SEQ ID NO: 162 - protein, 7 aa, synthetic construct
DMGNLGR

SEQ ID NO: 163 - protein, 7 aa, synthetic construct
QKEILTR

SEQ ID NO: 164 - protein, 7 aa, synthetic construct
QNSHLRR

SEQ ID NO: 165 - protein, 7 aa, synthetic construct
QTTHLSR

SEQ ID NO: 166 - protein, 7 aa, synthetic construct
QARSLRA

SEQ ID NO: 167 - protein, 7 aa, synthetic construct
RTDSLPR

SEQ ID NO: 168 - protein, 7 aa, synthetic construct
RLDMLAR

SEQ ID NO: 169 - protein, 7 aa, synthetic construct
RNTHLSY

SEQ ID NO: 170 - protein, 7 aa, synthetic construct
RREHLVR

SEQ ID NO: 171 - protein, 7 aa, synthetic construct
DSSVLRR

SEQ ID NO: 172 - protein, 7 aa, synthetic construct
RIDNLDG

SEQ ID NO: 173 - protein, 7 aa, synthetic construct
RRDNLPK

SEQ ID NO: 174 - protein, 7 aa, synthetic construct
ANRTLVH

SEQ ID NO: 175 - protein, 7 aa, synthetic construct
RADVLKG

SEQ ID NO: 176 - protein, 7 aa, synthetic construct
RKESLTV

SEQ ID NO: 177 - protein, 7 aa, synthetic construct
RREHLSG

SEQ ID NO: 178 - protein, 7 aa, synthetic construct
RREHLTI

SEQ ID NO: 179 - protein, 7 aa, synthetic construct
RSDHLSL

SEQ ID NO: 180 - protein, 7 aa, synthetic construct
VGGNLAR

SEQ ID NO: 181 - protein, 7 aa, synthetic construct
VGGNLSR

SEQ ID NO: 182 - protein, 7 aa, synthetic construct
DHSSLKR

SEQ ID NO: 183 - protein, 7 aa, synthetic construct
RTDSLTL

SEQ ID NO: 184 - protein, 7 aa, synthetic construct
ESGHLKR

SEQ ID NO: 185 - protein, 7 aa, synthetic construct
EGGHLKR

SEQ ID NO: 186 - protein, 7 aa, synthetic construct
QSGTLHR

SEQ ID NO: 187 - protein, 7 aa, synthetic construct
QSTTLKR

SEQ ID NO: 188 - protein, 7 aa, synthetic construct
RADNLRR

SEQ ID NO: 189 - protein, 7 aa, synthetic construct
RSHNLKL

SEQ ID NO: 190 - protein, 7 aa, synthetic construct
RSHNLRL

SEQ ID NO: 191 - protein, 7 aa, synthetic construct
QSTTLKR

SEQ ID NO: 192 - protein, 7 aa, synthetic construct
SDRRDLD

SEQ ID NO: 193 - protein, 7 aa, synthetic construct
QSAHLKR

SEQ ID NO: 194 - protein, 7 aa, synthetic construct
DLSTLRR

SEQ ID NO: 195 - protein, 7 aa, synthetic construct
DGSTLRR

SEQ ID NO: 196 - protein, 7 aa, synthetic construct
EKASLIK

SEQ ID NO: 197 - protein, 7 aa, synthetic construct
DKSSLRK

SEQ ID NO: 198 - protein, 7 aa, synthetic construct
CNGSLKK

SEQ ID NO: 199 - protein, 7 aa, synthetic construct
DHSSLKR

SEQ ID NO: 200 - protein, 7 aa, synthetic construct
RGDGLRR

SEQ ID NO: 201 - protein, 7 aa, synthetic construct
RKLGLLR

SEQ ID NO: 202 - protein, 7 aa, synthetic construct
GLTALRT

SEQ ID NO: 203 - protein, 7 aa, synthetic construct
QNANLKR

SEQ ID NO: 204 - protein, 7 aa, synthetic construct
LKSNLHR

SEQ ID NO: 205 - protein, 7 aa, synthetic construct
QRRYLVE

SEQ ID NO: 206 - protein, 7 aa, synthetic construct
TTFNLRV

SEQ ID NO: 207 - protein, 7 aa, synthetic construct
EEANLRR

SEQ ID NO: 208 - protein, 7 aa, synthetic construct
QRSSLVR

SEQ ID NO: 209 - protein, 7 aa, synthetic construct
QSSSLVR

SEQ ID NO: 210 - protein, 7 aa, synthetic construct
KRYNLYQ

SEQ ID NO: 211 - protein, 7 aa, synthetic construct
KKFNLLQ

SEQ ID NO: 212 - protein, 7 aa, synthetic construct
RNFILQR

SEQ ID NO: 213 - protein, 7 aa, synthetic construct
RNFILAR

SEQ ID NO: 214 - protein, 7 aa, synthetic construct
QREHLTT

SEQ ID NO: 215 - protein, 7 aa, synthetic construct
QREHLNG

SEQ ID NO: 216 - protein, 7 aa, synthetic construct
DPANLRR

SEQ ID NO: 217 - protein, 7 aa, synthetic construct
RRRNLTL

SEQ ID NO: 218 - protein, 7 aa, synthetic construct
RRRNLQL

SEQ ID NO: 219 - protein, 7 aa, synthetic construct
DKANLTR

SEQ ID NO: 220 - protein, 7 aa, synthetic construct
DSSNLRR

SEQ ID NO: 221 - protein, 7 aa, synthetic construct
EQGNLLR

SEQ ID NO: 222 - protein, 7 aa, synthetic construct
QSTTLKR

SEQ ID NO: 223 - protein, 7 aa, synthetic construct
RRDGLAG

SEQ ID NO: 224 - protein, 7 aa, synthetic construct
SFQSYLE

SEQ ID NO: 225 - protein, 7 aa, synthetic construct
ETGSLRR

SEQ ID NO: 226 - protein, 7 aa, synthetic construct
DRTPLNR

SEQ ID NO: 227 - protein, 7 aa, synthetic construct
QNEHLKV

SEQ ID NO: 228 - protein, 7 aa, synthetic construct
QKTHLAV

SEQ ID NO: 229 - protein, 7 aa, synthetic construct
DHSSLKR

SEQ ID NO: 230 - protein, 7 aa, synthetic construct
QPHGLAH

SEQ ID NO: 231 - protein, 7 aa, synthetic construct
QPHGLRH

SEQ ID NO: 232 - protein, 7 aa, synthetic construct
QPHGLST

SEQ ID NO: 233 - protein, 7 aa, synthetic construct
RRDNLNR

SEQ ID NO: 234 - protein, 7 aa, synthetic construct
RQDNLGR

SEQ ID NO: 235 - protein, 7 aa, synthetic construct
ERAKLIR

SEQ ID NO: 236 - protein, 7 aa, synthetic construct
QKHHLAV

SEQ ID NO: 237 - protein, 7 aa, synthetic construct
LKQHLVV

SEQ ID NO: 238 - protein, 7 aa, synthetic construct
QQTNLAR

SEQ ID NO: 239 - protein, 7 aa, synthetic construct
QTQNLTR

SEQ ID NO: 240 - protein, 7 aa, synthetic construct
RGEHLTR

SEQ ID NO: 241 - protein, 7 aa, synthetic construct
RREHLVR

SEQ ID NO: 242 - protein, 7 aa, synthetic construct
RKDALHV

SEQ ID NO: 243 - protein, 7 aa, synthetic construct
RKERLAT

SEQ ID NO: 244 - protein, 7 aa, synthetic construct
DPTSLNR

SEQ ID NO: 245 - protein, 7 aa, synthetic construct
RQDNLNT

SEQ ID NO: 246 - protein, 7 aa, synthetic construct
RRDNLKS

SEQ ID NO: 247 - protein, 7 aa, synthetic construct
RNDTLII

SEQ ID NO: 248 - protein, 7 aa, synthetic construct
RQDILVV

SEQ ID NO: 249 - protein, 7 aa, synthetic construct
RGDNLKR

SEQ ID NO: 250 - protein, 7 aa, synthetic construct
RGDNLAR

SEQ ID NO: 251 - protein, 7 aa, synthetic construct
RQEHLVR

SEQ ID NO: 252 - protein, 7 aa, synthetic construct
DRSSLKR

SEQ ID NO: 253 - protein, 7 aa, synthetic construct
AMRSLMG

SEQ ID NO: 254 - protein, 7 aa, synthetic construct
QQRSLVG

SEQ ID NO: 255 - protein, 7 aa, synthetic construct
DQGNLIR

SEQ ID NO: 256 - protein, 7 aa, synthetic construct
DGGNLGR

SEQ ID NO: 257 - protein, 7 aa, synthetic construct
RNTNLTR

SEQ ID NO: 258 - protein, 7 aa, synthetic construct
RQDNLGR

SEQ ID NO: 259 - protein, 7 aa, synthetic construct
VHHNLVR

SEQ ID NO: 260 - protein, 7 aa, synthetic construct
RPNHLAI

SEQ ID NO: 261 - protein, 7 aa, synthetic construct
QSHSLKS

SEQ ID NO: 262 - protein, 7 aa, synthetic construct
QKHHLVT

SEQ ID NO: 263 - protein, 7 aa, synthetic construct
GGTALRM

SEQ ID NO: 264 - protein, 7 aa, synthetic construct
GGSALSM

SEQ ID NO: 265 - protein, 7 aa, synthetic construct
RRFILSR

SEQ ID NO: 266 - protein, 7 aa, synthetic construct
RNFILQR

SEQ ID NO: 267 - protein, 7 aa, synthetic construct
QSAHLKR

SEQ ID NO: 268 - protein, 7 aa, synthetic construct
QQAHLVR

SEQ ID NO: 269 - protein, 7 aa, synthetic construct
RARNLTL

SEQ ID NO: 270 - protein, 7 aa, synthetic construct
RRRNLQL

SEQ ID NO: 271 - protein, 7 aa, synthetic construct
AKRDLDR

SEQ ID NO: 272 - protein, 7 aa, synthetic construct
LRKDLVR

SEQ ID NO: 273 - protein, 7 aa, synthetic construct
QRSNLAR

SEQ ID NO: 274 - protein, 7 aa, synthetic construct
LKTNLAR

SEQ ID NO: 275 - protein, 7 aa, synthetic construct
QRSDLTR

SEQ ID NO: 276 - protein, 7 aa, synthetic construct
HKETLNR

SEQ ID NO: 277 - protein, 7 aa, synthetic construct
TNSSLTR

SEQ ID NO: 278 - protein, 7 aa, synthetic construct
MTSSLRR

SEQ ID NO: 279 - protein, 7 aa, synthetic construct
VRHNLTR

SEQ ID NO: 280 - protein, 7 aa, synthetic construct
VAHNLTR

SEQ ID NO: 281 - protein, 7 aa, synthetic construct
QSSSLVR

SEQ ID NO: 282 - protein, 7 aa, synthetic construct
RSHNLKL

SEQ ID NO: 283 - protein, 7 aa, synthetic construct
RSHNLRL

SEQ ID NO: 284 - protein, 7 aa, synthetic construct
TSTLLKR

SEQ ID NO: 285 - protein, 7 aa, synthetic construct
HKSSLTR

SEQ ID NO: 286 - protein, 7 aa, synthetic construct
RRQKLTI

SEQ ID NO: 287 - protein, 7 aa, synthetic construct
MKHHLGR

SEQ ID NO: 288 - protein, 7 aa, synthetic construct
LKQHLVR

SEQ ID NO: 289 - protein, 7 aa, synthetic construct
QNEHLKV

SEQ ID NO: 290 - protein, 7 aa, synthetic construct
QKTHLAV

SEQ ID NO: 291 - protein, 7 aa, synthetic construct
QPHSLAV

SEQ ID NO: 292 - protein, 7 aa, synthetic construct
RRQHLQY

SEQ ID NO: 293 - protein, 7 aa, synthetic construct
RRSRLVR

SEQ ID NO: 294 - protein, 7 aa, synthetic construct
EAHHLSR

SEQ ID NO: 295 - protein, 7 aa, synthetic construct
RQSRLQR

SEQ ID NO: 296 - protein, 7 aa, synthetic construct
HRHVLIN

SEQ ID NO: 297 - protein, 7 aa, synthetic construct
IKHNLAR

SEQ ID NO: 298 - protein, 7 aa, synthetic construct
VVNNLNR

SEQ ID NO: 299 - protein, 7 aa, synthetic construct
ISHNLAR

SEQ ID NO: 300 - protein, 7 aa, synthetic construct
QSPHLKR

SEQ ID NO: 301 - protein, 7 aa, synthetic construct
ESGHLKR

SEQ ID NO: 302 - protein, 7 aa, synthetic construct
ENSKLRR

SEQ ID NO: 303 - protein, 7 aa, synthetic construct
QRSSLVR

SEQ ID NO: 304 - protein, 7 aa, synthetic construct
RNDSLKC

SEQ ID NO: 305 - protein, 7 aa, synthetic construct
RNDTLII

SEQ ID NO: 306 - protein, 7 aa, synthetic construct
VGNSLSR

SEQ ID NO: 307 - protein, 7 aa, synthetic construct
VHESLKR

SEQ ID NO: 308 - protein, 7 aa, synthetic construct
DPSSLKR

SEQ ID NO: 309 - protein, 7 aa, synthetic construct
DHSSLKR

SEQ ID NO: 310 - protein, 7 aa, synthetic construct
VNSSLTR

SEQ ID NO: 311 - protein, 7 aa, synthetic construct
VRHSLTR

SEQ ID NO: 312 - protein, 7 aa, synthetic construct
QKVHLEA

SEQ ID NO: 313 - protein, 7 aa, synthetic construct
QKCHLKA

SEQ ID NO: 314 - protein, 7 aa, synthetic construct
RGDNLNR

SEQ ID NO: 315 - protein, 7 aa, synthetic construct
REDNLGR

SEQ ID NO: 316 - protein, 7 aa, synthetic construct
RIDNLIR

SEQ ID NO: 317 - protein, 7 aa, synthetic construct
RQDNLGR

SEQ ID NO: 318 - protein, 7 aa, synthetic construct
QTNTLGR

SEQ ID NO: 319 - protein, 7 aa, synthetic construct
QGGTLRR

SEQ ID NO: 320 - protein, 7 aa, synthetic construct
QSTTLKR

SEQ ID NO: 321 - protein, 7 aa, synthetic construct
LKEHLTR

SEQ ID NO: 322 - protein, 7 aa, synthetic construct
HKSSLTR

SEQ ID NO: 323 - protein, 7 aa, synthetic construct
QNSHLRR

SEQ ID NO: 324 - protein, 7 aa, synthetic construct
QGGHLAR

SEQ ID NO: 325 - protein, 7 aa, synthetic construct
QGGHLKR

SEQ ID NO: 326 - protein, 7 aa, synthetic construct
QKPHLSR

SEQ ID NO: 327 - protein, 7 aa, synthetic construct
QSAHLKR

SEQ ID NO: 328 - protein, 7 aa, synthetic construct
RGEHLTR

SEQ ID NO: 329 - protein, 7 aa, synthetic construct
RTEHLAR

SEQ ID NO: 330 - protein, 7 aa, synthetic construct
RREHLVR

SEQ ID NO: 331 - protein, 7 aa, synthetic construct
TNSSLTR

SEQ ID NO: 332 - protein, 7 aa, synthetic construct
IRTSLKR

SEQ ID NO: 333 - DNA, 20 bp, Hepatitis B virus
  source 1..20: mol_type = genomic DNA
cctgctggtggctccagttc

SEQ ID NO: 334 - DNA, 20 bp, Hepatitis B virus
  source 1..20: mol_type = genomic DNA
ctgaactggagccaccagca

SEQ ID NO: 335 - DNA, 20 bp, Hepatitis B virus
  source 1..20: mol_type = genomic DNA
cctgaactggagccaccagc

SEQ ID NO: 336 - DNA, 20 bp, Hepatitis B virus
  source 1..20: mol_type = genomic DNA
cctcgagaagattgacgata

SEQ ID NO: 337 - DNA, 20 bp, Hepatitis B virus
  source 1..20: mol_type = genomic DNA
tcgtcaatcttctcgaggat

SEQ ID NO: 338 - DNA, 20 bp, Hepatitis B virus
  source 1..20: mol_type = genomic DNA
cgtcaatcttctcgaggatt

SEQ ID NO: 339 - DNA, 20 bp, Hepatitis B virus
  source 1..20: mol_type = genomic DNA
gtcaatcttctcgaggattg

SEQ ID NO: 340 - DNA, 20 bp, Hepatitis B virus
  source 1..20: mol_type = genomic DNA
aacatggagaacatcacatc

SEQ ID NO: 341 - DNA, 20 bp, Hepatitis B virus
  source 1..20: mol_type = genomic DNA
aacatcacatcaggattcct

SEQ ID NO: 342 - DNA, 20 bp, Hepatitis B virus
  source 1..20: mol_type = genomic DNA
ctagactctgcggtattgtg

SEQ ID NO: 343 - DNA, 20 bp, Hepatitis B virus
  source 1..20: mol_type = genomic DNA
taccgcagagtctagactcg

SEQ ID NO: 344 - DNA, 20 bp, Hepatitis B virus
  source 1..20: mol_type = genomic DNA
cgcagagtctagactcgtgg

SEQ ID NO: 345 - DNA, 20 bp, Hepatitis B virus
  source 1..20: mol_type = genomic DNA
caccacgagtctagactctg

SEQ ID NO: 346 - DNA, 20 bp, Hepatitis B virus
  source 1..20: mol_type = genomic DNA
tggacttctctcaattttct

SEQ ID NO: 347 - DNA, 20 bp, Hepatitis B virus
  source 1..20: mol_type = genomic DNA
ggacttctctcaattttcta

SEQ ID NO: 348 - DNA, 20 bp, Hepatitis B virus
  source 1..20: mol_type = genomic DNA
gacttctctcaattttctag

SEQ ID NO: 349 - DNA, 20 bp, Hepatitis B virus
  source 1..20: mol_type = genomic DNA
acttctctcaattttctagg

SEQ ID NO: 350 - DNA, 20 bp, Hepatitis B virus
  source 1..20: mol_type = genomic DNA
cgaattttggccaagacaca

SEQ ID NO: 351 - DNA, 20 bp, Hepatitis B virus
  source 1..20: mol_type = genomic DNA
aggttggggactgcgaattt

SEQ ID NO: 352 - DNA, 20 bp, Hepatitis B virus
  source 1..20: mol_type = genomic DNA
ggcatagcagcaggatgaag

SEQ ID NO: 353 - DNA, 20 bp, Hepatitis B virus
  source 1..20: mol_type = genomic DNA
agaagatgaggcatagcagc

SEQ ID NO: 354 - DNA, 20 bp, Hepatitis B virus
  source 1..20: mol_type = genomic DNA
gctatgcctcatcttcttgt

SEQ ID NO: 355 - DNA, 20 bp, Hepatitis B virus
  source 1..20: mol_type = genomic DNA
gaagaaccaacaagaagatg

SEQ ID NO: 356 - DNA, 20 bp, Hepatitis B virus
  source 1..20: mol_type = genomic DNA
catcttcttgttggttcttc

SEQ ID NO: 357 - DNA, 20 bp, Hepatitis B virus
  source 1..20: mol_type = genomic DNA
cccgtttgtcctctaattcc

SEQ ID NO: 358 - DNA, 20 bp, Hepatitis B virus
  source 1..20: mol_type = genomic DNA
cctggaattagaggacaaac

SEQ ID NO: 359 - DNA, 20 bp, Hepatitis B virus
  source 1..20: mol_type = genomic DNA
tcctggaattagaggacaaa

SEQ ID NO: 360 - DNA, 20 bp, Hepatitis B virus
  source 1..20: mol_type = genomic DNA
tactagtgccatttgttcag

SEQ ID NO: 361 - DNA, 20 bp, Hepatitis B virus
  source 1..20: mol_type = genomic DNA
ccatttgttcagtggttcgt

SEQ ID NO: 362 - DNA, 20 bp, Hepatitis B virus
  source 1..20: mol_type = genomic DNA
catttgttcagtggttcgta

SEQ ID NO: 363 - DNA, 20 bp, Hepatitis B virus
  source 1..20: mol_type = genomic DNA
cctacgaaccactgaacaaa

SEQ ID NO: 364 - DNA, 20 bp, Hepatitis B virus
  source 1..20: mol_type = genomic DNA
tttcagttatatggatgatg

SEQ ID NO: 365 - DNA, 20 bp, Hepatitis B virus
  source 1..20: mol_type = genomic DNA
caaaagaaaattggtaacag

SEQ ID NO: 366 - DNA, 20 bp, Hepatitis B virus
  source 1..20: mol_type = genomic DNA
taccaattttcttttgtctt

SEQ ID NO: 367 - DNA, 20 bp, Hepatitis B virus
  source 1..20: mol_type = genomic DNA
accaattttcttttgtcttt

SEQ ID NO: 368 - DNA, 20 bp, Hepatitis B virus
  source 1..20: mol_type = genomic DNA
acccaaagacaaaagaaaat

SEQ ID NO: 369 - DNA, 20 bp, Hepatitis B virus
  source 1..20: mol_type = genomic DNA
tgacatactttccaatcaat

SEQ ID NO: 370 - DNA, 20 bp, Hepatitis B virus
  source 1..20: mol_type = genomic DNA
cactttctcgccaacttaca

SEQ ID NO: 371 - DNA, 20 bp, Hepatitis B virus
  source 1..20: mol_type = genomic DNA
cacagaaaggccttgtaagt

SEQ ID NO: 372 - DNA, 20 bp, Hepatitis B virus
  source 1..20: mol_type = genomic DNA
tgaacctttaccccgttgcc

SEQ ID NO: 373 - DNA, 20 bp, Hepatitis B virus
  source 1..20: mol_type = genomic DNA
gggcaacggggtaaaggttc

SEQ ID NO: 374 - DNA, 20 bp, Hepatitis B virus
  source 1..20: mol_type = genomic DNA
tttaccccgttgcccggcaa

SEQ ID NO: 375 - DNA, 20 bp, Hepatitis B virus
  source 1..20: mol_type = genomic DNA
gttgccgggcaacggggtaa

SEQ ID NO: 376 - DNA, 20 bp, Hepatitis B virus
  source 1..20: mol_type = genomic DNA
cccgttgcccggcaacggcc

SEQ ID NO: 377 - DNA, 20 bp, Hepatitis B virus
  source 1..20: mol_type = genomic DNA
ctggccgttgccgggcaacg

SEQ ID NO: 378 - DNA, 20 bp, Hepatitis B virus
  source 1..20: mol_type = genomic DNA
cctggccgttgccgggcaac

SEQ ID NO: 379 - DNA, 20 bp, Hepatitis B virus
  source 1..20: mol_type = genomic DNA
acctggccgttgccgggcaa

SEQ ID NO: 380 - DNA, 20 bp, Hepatitis B virus
  source 1..20: mol_type = genomic DNA
gcacagacctggccgttgcc

SEQ ID NO: 381 - DNA, 20 bp, Hepatitis B virus
  source 1..20: mol_type = genomic DNA
ggcacagacctggccgttgc

SEQ ID NO: 382 - DNA, 20 bp, Hepatitis B virus
  source 1..20: mol_type = genomic DNA
gcaaacacttggcacagacc

SEQ ID NO: 383 - DNA, 20 bp, Hepatitis B virus
  source 1..20: mol_type = genomic DNA
gggttgcgtcagcaaacact

SEQ ID NO: 384 - DNA, 20 bp, Hepatitis B virus
  source 1..20: mol_type = genomic DNA
tttgctgacgcaacccccac

SEQ ID NO: 385 - DNA, 20 bp, Hepatitis B virus
  source 1..20: mol_type = genomic DNA
ctgacgcaacccccactggc

SEQ ID NO: 386 - DNA, 20 bp, Hepatitis B virus
  source 1..20: mol_type = genomic DNA
tgacgcaacccccactggct

SEQ ID NO: 387 - DNA, 20 bp, Hepatitis B virus
  source 1..20: mol_type = genomic DNA
gacgcaacccccactggctg

SEQ ID NO: 388 - DNA, 20 bp, Hepatitis B virus
  source 1..20: mol_type = genomic DNA
aacccccactggctggggct

SEQ ID NO: 389 - DNA, 20 bp, Hepatitis B virus
  source 1..20: mol_type = genomic DNA
tcctctgccgatccatactg

SEQ ID NO: 390 - DNA, 20 bp, Hepatitis B virus
  source 1..20: mol_type = genomic DNA
tccgcagtatggatcggcag

SEQ ID NO: 391 - DNA, 20 bp, Hepatitis B virus
  source 1..20: mol_type = genomic DNA
aggagttccgcagtatggat

SEQ ID NO: 392 - DNA, 20 bp, Hepatitis B virus
  source 1..20: mol_type = genomic DNA
cggctaggagttccgcagta

SEQ ID NO: 393 - DNA, 20 bp, Hepatitis B virus
  source 1..20: mol_type = genomic DNA
tgcgagcaaaacaagcggct

SEQ ID NO: 394 - DNA, 20 bp, Hepatitis B virus
  source 1..20: mol_type = genomic DNA
ccgcttgttttgctcgcagc

SEQ ID NO: 395 - DNA, 20 bp, Hepatitis B virus
  source 1..20: mol_type = genomic DNA
cctgctgcgagcaaaacaag

SEQ ID NO: 396 - DNA, 20 bp, Hepatitis B virus
  source 1..20: mol_type = genomic DNA
tgttttgctcgcagcaggtc

SEQ ID NO: 397 - DNA, 20 bp, Hepatitis B virus
  source 1..20: mol_type = genomic DNA
gcagcacagcctagcagcca

SEQ ID NO: 398 - DNA, 20 bp, Hepatitis B virus
  source 1..20: mol_type = genomic DNA
tgctaggctgtgctgccaac

SEQ ID NO: 399 - DNA, 20 bp, Hepatitis B virus
  source 1..20: mol_type = genomic DNA
gctgccaactggatcctgcg

SEQ ID NO: 400 - DNA, 20 bp, Hepatitis B virus
  source 1..20: mol_type = genomic DNA
ctgccaactggatcctgcgc

SEQ ID NO: 401 - DNA, 20 bp, Hepatitis B virus
  source 1..20: mol_type = genomic DNA
cgtcccgcgcaggatccagt

SEQ ID NO: 402 - DNA, 20 bp, Hepatitis B virus
  source 1..20: mol_type = genomic DNA
aaacaaaggacgtcccgcgc

SEQ ID NO: 403 - DNA, 20 bp, Hepatitis B virus
  source 1..20: mol_type = genomic DNA
gtcctttgtttacgtcccgt

SEQ ID NO: 404 - DNA, 20 bp, Hepatitis B virus
  source 1..20: mol_type = genomic DNA
cgccgacgggacgtaaacaa

SEQ ID NO: 405 - DNA, 20 bp, Hepatitis B virus
  source 1..20: mol_type = genomic DNA
tgccgttccgaccgaccacg

SEQ ID NO: 406 - DNA, 20 bp, Hepatitis B virus
  source 1..20: mol_type = genomic DNA
aggtgcgccccgtggtcggt

SEQ ID NO: 407 - DNA, 20 bp, Hepatitis B virus
  source 1..20: mol_type = genomic DNA
agagaggtgcgccccgtggt

SEQ ID NO: 408 - DNA, 20 bp, Hepatitis B virus
  source 1..20: mol_type = genomic DNA
gtaaagagaggtgcgccccg

SEQ ID NO: 409 - DNA, 20 bp, Hepatitis B virus
  source 1..20: mol_type = genomic DNA
ggggcgcacctctctttacg

SEQ ID NO: 410 - DNA, 20 bp, Hepatitis B virus
  source 1..20: mol_type = genomic DNA
cggggagtccgcgtaaagag

SEQ ID NO: 411 - DNA, 20 bp, Hepatitis B virus
  source 1..20: mol_type = genomic DNA
cagatgagaaggcacagacg

SEQ ID NO: 412 - DNA, 20 bp, Hepatitis B virus
  source 1..20: mol_type = genomic DNA
gtctgtgccttctcatctgc

SEQ ID NO: 413 - DNA, 20 bp, Hepatitis B virus
  source 1..20: mol_type = genomic DNA
ggcagatgagaaggcacaga

SEQ ID NO: 414 - DNA, 20 bp, Hepatitis B virus
  source 1..20: mol_type = genomic DNA
gcagatgagaaggcacagac

SEQ ID NO: 415 - DNA, 20 bp, Hepatitis B virus
  source 1..20: mol_type = genomic DNA
acacggtccggcagatgaga

SEQ ID NO: 416 - DNA, 20 bp, Hepatitis B virus
  source 1..20: mol_type = genomic DNA
gaagcgaagtgcacacggtc

SEQ ID NO: 417 - DNA, 20 bp, Hepatitis B virus
  source 1..20: mol_type = genomic DNA
gaggtgaagcgaagtgcaca

SEQ ID NO: 418 - DNA, 20 bp, Hepatitis B virus
  source 1..20: mol_type = genomic DNA
cttcacctctgcacgtcgca

SEQ ID NO: 419 - DNA, 20 bp, Hepatitis B virus
  source 1..20: mol_type = genomic DNA
ggtctccatgcgacgtgcag

SEQ ID NO: 420 - DNA, 20 bp, Hepatitis B virus
  source 1..20: mol_type = genomic DNA
tgcccaaggtcttacataag

SEQ ID NO: 421 - DNA, 20 bp, Hepatitis B virus
  source 1..20: mol_type = genomic DNA
gtcctcttatgtaagacctt

SEQ ID NO: 422 - DNA, 20 bp, Hepatitis B virus
  source 1..20: mol_type = genomic DNA
agtcctcttatgtaagacct

SEQ ID NO: 423 - DNA, 20 bp, Hepatitis B virus
  source 1..20: mol_type = genomic DNA
gtcttacataagaggactct

SEQ ID NO: 424 - DNA, 20 bp, Hepatitis B virus
  source 1..20: mol_type = genomic DNA
aatgtcaacgaccgaccttg

SEQ ID NO: 425 - DNA, 20 bp, Hepatitis B virus
  source 1..20: mol_type = genomic DNA
tttgaagtatgcctcaaggt

SEQ ID NO: 426 - DNA, 20 bp, Hepatitis B virus
  source 1..20: mol_type = genomic DNA
agtctttgaagtatgcctca

SEQ ID NO: 427 - DNA, 20 bp, Hepatitis B virus
  source 1..20: mol_type = genomic DNA
aagactgtttgtttaaagac

SEQ ID NO: 428 - DNA, 20 bp, Hepatitis B virus
  source 1..20: mol_type = genomic DNA
agactgtttgtttaaagact

SEQ ID NO: 429 - DNA, 20 bp, Hepatitis B virus
  source 1..20: mol_type = genomic DNA
ctgtttgtttaaagactggg

SEQ ID NO: 430 - DNA, 20 bp, Hepatitis B virus
  source 1..20: mol_type = genomic DNA
gtttaaagactgggaggagt

SEQ ID NO: 431 - DNA, 20 bp, Hepatitis B virus
  source 1..20: mol_type = genomic DNA
tctttgtactaggaggctgt

SEQ ID NO: 432 - DNA, 20 bp, Hepatitis B virus
  source 1..20: mol_type = genomic DNA
aggaggctgtaggcataaat

SEQ ID NO: 433 - DNA, 20 bp, Hepatitis B virus
  source 1..20: mol_type = genomic DNA
gtgaaaaagttgcatggtgc

SEQ ID NO: 434 - DNA, 20 bp, Hepatitis B virus
  source 1..20: mol_type = genomic DNA
gcagaggtgaaaaagttgca

SEQ ID NO: 435 - DNA, 20 bp, Hepatitis B virus
  source 1..20: mol_type = genomic DNA
aacaagagatgattaggcag

SEQ ID NO: 436 - DNA, 20 bp, Hepatitis B virus
  source 1..20: mol_type = genomic DNA
gacatgaacaagagatgatt

SEQ ID NO: 437 - DNA, 20 bp, Hepatitis B virus
  source 1..20: mol_type = genomic DNA
agcttggaggcttgaacagt

SEQ ID NO: 438 - DNA, 20 bp, Hepatitis B virus
  source 1..20: mol_type = genomic DNA
caagcctccaagctgtgcct

SEQ ID NO: 439 - DNA, 20 bp, Hepatitis B virus
  source 1..20: mol_type = genomic DNA
aagcctccaagctgtgcctt

SEQ ID NO: 440 - DNA, 20 bp, Hepatitis B virus
  source 1..20: mol_type = genomic DNA
cctccaagctgtgccttggg

SEQ ID NO: 441 - DNA, 20 bp, Hepatitis B virus
  source 1..20: mol_type = genomic DNA
ccacccaaggcacagcttgg

SEQ ID NO: 442 - DNA, 20 bp, Hepatitis B virus
  source 1..20: mol_type = genomic DNA
agctgtgccttgggtggctt

SEQ ID NO: 443 - DNA, 20 bp, Hepatitis B virus
  source 1..20: mol_type = genomic DNA
aagccacccaaggcacagct

SEQ ID NO: 444 - DNA, 20 bp, Hepatitis B virus
  source 1..20: mol_type = genomic DNA
gctgtgccttgggtggcttt

SEQ ID NO: 445 - DNA, 20 bp, Hepatitis B virus
  source 1..20: mol_type = genomic DNA
ctgtgccttgggtggctttg

SEQ ID NO: 446 - DNA, 20 bp, Hepatitis B virus
  source 1..20: mol_type = genomic DNA
tagctccaaattctttataa

SEQ ID NO: 447 - DNA, 20 bp, Hepatitis B virus
  source 1..20: mol_type = genomic DNA
gtagctccaaattctttata

SEQ ID NO: 448 - DNA, 20 bp, Hepatitis B virus
  source 1..20: mol_type = genomic DNA
taaagaatttggagctactg

SEQ ID NO: 449 - DNA, 20 bp, Hepatitis B virus
  source 1..20: mol_type = genomic DNA
atgactctagctacctgggt

SEQ ID NO: 450 - DNA, 20 bp, Hepatitis B virus
  source 1..20: mol_type = genomic DNA
cacatttcttgtctcacttt

SEQ ID NO: 451 - DNA, 20 bp, Hepatitis B virus
  source 1..20: mol_type = genomic DNA
tagtttccggaagtgttgat

SEQ ID NO: 452 - DNA, 20 bp, Hepatitis B virus
  source 1..20: mol_type = genomic DNA
cgtctaacaacagtagtttc

SEQ ID NO: 453 - DNA, 20 bp, Hepatitis B virus
  source 1..20: mol_type = genomic DNA
actactgttgttagacgacg

SEQ ID NO: 454 - DNA, 20 bp, Hepatitis B virus
  source 1..20: mol_type = genomic DNA
ctgttgttagacgacgaggc

SEQ ID NO: 455 - DNA, 20 bp, Hepatitis B virus
  source 1..20: mol_type = genomic DNA
cgagggagttcttcttctag

SEQ ID NO: 456 - DNA, 20 bp, Hepatitis B virus
  source 1..20: mol_type = genomic DNA
gcgagggagttcttcttcta

SEQ ID NO: 457 - DNA, 20 bp, Hepatitis B virus
  source 1..20: mol_type = genomic DNA
ggcgagggagttcttcttct

SEQ ID NO: 458 - DNA, 20 bp, Hepatitis B virus
  source 1..20: mol_type = genomic DNA
ctccctcgcctcgcagacga

SEQ ID NO: 459 - DNA, 20 bp, Hepatitis B virus
  source 1..20: mol_type = genomic DNA
gaccttcgtctgcgaggcga

SEQ ID NO: 460 - DNA, 20 bp, Hepatitis B virus
  source 1..20: mol_type = genomic DNA
agaccttcgtctgcgaggcg

SEQ ID NO: 461 - DNA, 20 bp, Hepatitis B virus
  source 1..20: mol_type = genomic DNA
gattgagaccttcgtctgcg

SEQ ID NO: 462 - DNA, 20 bp, Hepatitis B virus
  source 1..20: mol_type = genomic DNA
gattgagatcttctgcgacg

SEQ ID NO: 463 - DNA, 20 bp, Hepatitis B virus
  source 1..20: mol_type = genomic DNA
gtcgcagaagatctcaatct

SEQ ID NO: 464 - DNA, 20 bp, Hepatitis B virus
  source 1..20: mol_type = genomic DNA
tcgcagaagatctcaatctc

SEQ ID NO: 465 - DNA, 20 bp, Hepatitis B virus
  source 1..20: mol_type = genomic DNA
atatggtgacccacaaaatg

SEQ ID NO: 466 - DNA, 20 bp, Hepatitis B virus
  source 1..20: mol_type = genomic DNA
tttgtgggtcaccatattct

SEQ ID NO: 467 - DNA, 20 bp, Hepatitis B virus
  source 1..20: mol_type = genomic DNA
ttgtgggtcaccatattctt

SEQ ID NO: 468 - DNA, 20 bp, Hepatitis B virus
  source 1..20: mol_type = genomic DNA
gctggatccaactggtggtc

SEQ ID NO: 469 - DNA, 20 bp, Hepatitis B virus
  source 1..20: mol_type = genomic DNA
caccccaaaaggcctccgtg

SEQ ID NO: 470 - DNA, 20 bp, Hepatitis B virus
  source 1..20: mol_type = genomic DNA
ccttttggggtggagccctc

SEQ ID NO: 471 - DNA, 20 bp, Hepatitis B virus
  source 1..20: mol_type = genomic DNA
cctgagggctccaccccaaa

SEQ ID NO: 472 - DNA, 20 bp, Hepatitis B virus
  source 1..20: mol_type = genomic DNA
ggggtggagccctcaggctc

SEQ ID NO: 473 - DNA, 20 bp, Hepatitis B virus
  source 1..20: mol_type = genomic DNA
gggtggagccctcaggctca

SEQ ID NO: 474 - DNA, 20 bp, Hepatitis B virus
  source 1..20: mol_type = genomic DNA
cgattggtggaggcaggagg

SEQ ID NO: 475 - DNA, 20 bp, Hepatitis B virus
  source 1..20: mol_type = genomic DNA
ctcatcctcaggccatgcag

SEQ ID NO: 476 - protein, 1521 aa, synthetic construct
MYPYDVPDYASPKKKRKVEASDKKYSIGLAIGTNSVGWAVITDEYKVPSKKFKVLGNTDRHSIKKNLIGALLFDSGETAEATRLKRTARRRYTRRKNRICYLQEIFSNEMAKVDDSFFHRLEESFLVEEDKKHERHPIFGNIVDEVAYHEKYPTIYHLRKKLVDSTDKADLRLIYLALAHMIKFRGHFLIEGDLNPDNSDVDKLFIQLVQTYNQLFEENPINASGVDAKAILSARLSKSRRLENLIAQLPGEKKNGLFGNLIALSLGLTPNFKSNFDLAEDAKLQLSKDTYDDDLDNLLAQIGDQYADLFLAAKNLSDAILLSDILRVNTEITKAPLSASMIKRYDEHHQDLTLLKALVRQQLPEKYKEIFFDQSKNGYAGYIDGGASQEEFYKFIKPILEKMDGTEELLVKLNREDLLRKQRTFDNGSIPHQIHLGELHAILRRQEDFYPFLKDNREKIEKILTFRIPYYVGPLARGNSRFAWMTRKSEETITPWNFEEVVDKGASAQSFIERMTNFDKNLPNEKVLPKHSLLYEYFTVYNELTKVKYVTEGMRKPAFLSGEQKKAIVDLLFKTNRKVTVKQLKEDYFKKIECFDSVEISGVEDRFNASLGTYHDLLKIIKDKDFLDNEENEDILEDIVLTLTLFEDREMIEERLKTYAHLFDDKVMKQLKRRRYTGWGRLSRKLINGIRDKQSGKTILDFLKSDGFANRNFMQLIHDDSLTFKEDIQKAQVSGQGDSLHEHIANLAGSPAIKKGILQTVKVVDELVKVMGRHKPENIVIEMARENQTTQKGQKNSRERMKRIEEGIKELGSQILKEHPVENTQLQNEKLYLYYLQNGRDMYVDQELDINRLSDYDVDAIVPQSFLKDDSIDNKVLTRSDKNRGKSDNVPSEEVVKKMKNYWRQLLNAKLITQRKFDNLTKAERGGLSELDKAGFIKRQLVETRQITKHVAQILDSRMNTKYDENDKLIREVKVITLKSKLVSDFRKDFQFYKVREINNYHHAHDAYLNAVVGTALIKKYPKLESEFVYGDYKVYDVRKMIAKSEQEIGKATAKYFFYSNIMNFFKTEITLANGEIRKRPLIETNGETGEIVWDKGRDFATVRKVLSMPQVNIVKKTEVQTGGFSKESILPKRNSDKLIARKKDWDPKKYGGFDSPTVAYSVLVVAKVEKGKSKKLKSVKELLGITIMERSSFEKNPIDFLEAKGYKEVKKDLIIKLPKYSLFELENGRKRMLASAGELQKGNELALPSKYVNFLYLASHYEKLKGSPEDNEQKQLFVEQHKHYLDEIIEQISEFSKRVILADANLDKVLSAYNKHRDKPIREQAENIIHLFTLTNLGAPAAFKYFDTTIDRKRYTSTKEVLDATLIHQSITGLYETRIDLSQLGGDSPKKKRKVGVDGSGGGALSPQHSAVTQGSIIKNKEGMDAKSLTAWSRTLVTFKDVFVDFTREEWKLLDTAQQIVYRNVMLENYKNLVSLGYQLTKPDVILRLEKGEEPWLVEREIHQETHPDSETAFEIKSSV

SEQ ID NO: 477 - protein, 1726 aa, synthetic construct
MYPYDVPDYASPKKKRKVEASDKKYSIGLAIGTNSVGWAVITDEYKVPSKKFKVLGNTDRHSIKKNLIGALLFDSGETAEATRLKRTARRRYTRRKNRICYLQEIFSNEMAKVDDSFFHRLEESFLVEEDKKHERHPIFGNIVDEVAYHEKYPTIYHLRKKLVDSTDKADLRLIYLALAHMIKFRGHFLIEGDLNPDNSDVDKLFIQLVQTYNQLFEENPINASGVDAKAILSARLSKSRRLENLIAQLPGEKKNGLFGNLIALSLGLTPNFKSNFDLAEDAKLQLSKDTYDDDLDNLLAQIGDQYADLFLAAKNLSDAILLSDILRVNTEITKAPLSASMIKRYDEHHQDLTLLKALVRQQLPEKYKEIFFDQSKNGYAGYIDGGASQEEFYKFIKPILEKMDGTEELLVKLNREDLLRKQRTFDNGSIPHQIHLGELHAILRRQEDFYPFLKDNREKIEKILTFRIPYYVGPLARGNSRFAWMTRKSEETITPWNFEEVVDKGASAQSFIERMTNFDKNLPNEKVLPKHSLLYEYFTVYNELTKVKYVTEGMRKPAFLSGEQKKAIVDLLFKTNRKVTVKQLKEDYFKKIECFDSVEISGVEDRFNASLGTYHDLLKIIKDKDFLDNEENEDILEDIVLTLTLFEDREMIEERLKTYAHLFDDKVMKQLKRRRYTGWGRLSRKLINGIRDKQSGKTILDFLKSDGFANRNFMQLIHDDSLTFKEDIQKAQVSGQGDSLHEHIANLAGSPAIKKGILQTVKVVDELVKVMGRHKPENIVIEMARENQTTQKGQKNSRERMKRIEEGIKELGSQILKEHPVENTQLQNEKLYLYYLQNGRDMYVDQELDINRLSDYDVDAIVPQSFLKDDSIDNKVLTRSDKNRGKSDNVPSEEVVKKMKNYWRQLLNAKLITQRKFDNLTKAERGGLSELDKAGFIKRQLVETRQITKHVAQILDSRMNTKYDENDKLIREVKVITLKSKLVSDFRKDFQFYKVREINNYHHAHDAYLNAVVGTALIKKYPKLESEFVYGDYKVYDVRKMIAKSEQEIGKATAKYFFYSNIMNFFKTEITLANGEIRKRPLIETNGETGEIVWDKGRDFATVRKVLSMPQVNIVKKTEVQTGGFSKESILPKRNSDKLIARKKDWDPKKYGGFDSPTVAYSVLVVAKVEKGKSKKLKSVKELLGITIMERSSFEKNPIDFLEAKGYKEVKKDLIIKLPKYSLFELENGRKRMLASAGELQKGNELALPSKYVNFLYLASHYEKLKGSPEDNEQKQLFVEQHKHYLDEIIEQISEFSKRVILADANLDKVLSAYNKHRDKPIREQAENIIHLFTLTNLGAPAAFKYFDTTIDRKRYTSTKEVLDATLIHQSITGLYETRIDLSQLGGDSPKKKRKVGVDGSGGGTYGLLRRREDWPSRLQMFFANNHDQEFDPPKVYPPVPAEKRKPIRVLSLFDGIATGLLVLKDLGIQVDRYIASEVCEDSITVGMVRHQGKIMYVGDVRSVTQKHIQEWGPFDLVIGGSPCNDLSIVNPARKGLYEGTGRLFFEFYRLLHDARPKEGDDRPFFWLFENVVAMGVSDKRDISRFLESNPVMIDAKEVSAAHRARYFWGNLPGMNRPLASTVNDKLELQECLEHGRIAKFSKVRTITTRSNSIKQGKDQHFPVFMNEKEDILWCTEMERVFGFPVHYTDVSNMSRLARQRLLGRSWSVPVIRHLFAPLKEYFACV

SEQ ID NO: 478 - protein, 1790 aa, synthetic construct
MYPYDVPDYASPKKKRKVEASDKKYSIGLAIGTNSVGWAVITDEYKVPSKKFKVLGNTDRHSIKKNLIGALLFDSGETAEATRLKRTARRRYTRRKNRICYLQEIFSNEMAKVDDSFFHRLEESFLVEEDKKHERHPIFGNIVDEVAYHEKYPTIYHLRKKLVDSTDKADLRLIYLALAHMIKFRGHFLIEGDLNPDNSDVDKLFIQLVQTYNQLFEENPINASGVDAKAILSARLSKSRRLENLIAQLPGEKKNGLFGNLIALSLGLTPNFKSNFDLAEDAKLQLSKDTYDDDLDNLLAQIGDQYADLFLAAKNLSDAILLSDILRVNTEITKAPLSASMIKRYDEHHQDLTLLKALVRQQLPEKYKEIFFDQSKNGYAGYIDGGASQEEFYKFIKPILEKMDGTEELLVKLNREDLLRKQRTFDNGSIPHQIHLGELHAILRRQEDFYPFLKDNREKIEKILTFRIPYYVGPLARGNSRFAWMTRKSEETITPWNFEEVVDKGASAQSFIERMTNFDKNLPNEKVLPKHSLLYEYFTVYNELTKVKYVTEGMRKPAFLSGEQKKAIVDLLFKTNRKVTVKQLKEDYFKKIECFDSVEISGVEDRFNASLGTYHDLLKIIKDKDFLDNEENEDILEDIVLTLTLFEDREMIEERLKTYAHLFDDKVMKQLKRRRYTGWGRLSRKLINGIRDKQSGKTILDFLKSDGFANRNFMQLIHDDSLTFKEDIQKAQVSGQGDSLHEHIANLAGSPAIKKGILQTVKVVDELVKVMGRHKPENIVIEMARENQTTQKGQKNSRERMKRIEEGIKELGSQILKEHPVENTQLQNEKLYLYYLQNGRDMYVDQELDINRLSDYDVDAIVPQSFLKDDSIDNKVLTRSDKNRGKSDNVPSEEVVKKMKNYWRQLLNAKLITQRKFDNLTKAERGGLSELDKAGFIKRQLVETRQITKHVAQILDSRMNTKYDENDKLIREVKVITLKSKLVSDFRKDFQFYKVREINNYHHAHDAYLNAVVGTALIKKYPKLESEFVYGDYKVYDVRKMIAKSEQEIGKATAKYFFYSNIMNFFKTEITLANGEIRKRPLIETNGETGEIVWDKGRDFATVRKVLSMPQVNIVKKTEVQTGGFSKESILPKRNSDKLIARKKDWDPKKYGGFDSPTVAYSVLVVAKVEKGKSKKLKSVKELLGITIMERSSFEKNPIDFLEAKGYKEVKKDLIIKLPKYSLFELENGRKRMLASAGELQKGNELALPSKYVNFLYLASHYEKLKGSPEDNEQKQLFVEQHKHYLDEIIEQISEFSKRVILADANLDKVLSAYNKHRDKPIREQAENIIHLFTLTNLGAPAAFKYFDTTIDRKRYTSTKEVLDATLIHQSITGLYETRIDLSQLGGDSPKKKRKVGVDGSGGGMAAIPALDPEAEPSMDVILVGSSELSSSVSPGTGRDLIAYEVKANQRNIEDICICCGSLQVHTQHPLFEGGICAPCKDKFLDALFLYDDDGYQSYCSICCSGETLLICGNPDCTRCYCFECVDSLVGPGTSGKVHAMSNWVCYLCLPSSRSGLLQRRRKWRSQLKAFYDRESENPLEMFETVPVWRRQPVRVLSLFEDIKKELTSLGFLESGSDPGQLKHVVDVTDTVRKDVEEWGPFDLVYGATPPLGHTCDRPPSWYLFQFHRLLQYARPKPGSPRPFFWMFVDNLVLNKEDLDVASRFLEMEPVTIPDVHGGSLQNAVRVWSNIPAIRSRHWALVSEEELSLLAQNKQSSKLAAKWPTKLVKNCFLPLREYFKYFSTELTSSL

SEQ ID NO: 479 - protein, 9 aa, synthetic construct
YPYDVPDYA

SEQ ID NO: 480 - protein, 5 aa, synthetic construct
GSGGG

SEQ ID NO: 481 - protein, 2315 aa, synthetic construct
MPKKKRKVPKKKRKVYNHDQEFDPPKVYPPVPAEKRKPIRVLSLFDGIATGLLVLKDLGIQVDRYIASEVCEDSITVGMVRHQGKIMYVGDVRSVTQKHIQEWGPFDLVIGGSPCNDLSIVNPARKGLYEGTGRLFFEFYRLLHDARPKEGDDRPFFWLFENVVAMGVSDKRDISRFLESNPVMIDAKEVSAAHRARYFWGNLPGMNRPLASTVNDKLELQECLEHGRIAKFSKVRTITTRSNSIKQGKDQHFPVFMNEKEDILWCTEMERVFGFPVHYTDVSNMSRLARQRLLGRSWSVPVIRHLFAPLKEYFACVSSGNSNANSRGPSFSSGLVPLSLRGSHMAAIPALDPEAEPSMDVILVGSSELSSSVSPGTGRDLIAYEVKANQRNIEDICICCGSLQVHTQHPLFEGGICAPCKDKFLDALFLYDDDGYQSYCSICCSGETLLICGNPDCTRCYCFECVDSLVGPGTSGKVHAMSNWVCYLCLPSSRSGLLQRRRKWRSQLKAFYDRESENPLEMFETVPVWRRQPVRVLSLFEDIKKELTSLGFLESGSDPGQLKHVVDVTDTVRKDVEEWGPFDLVYGATPPLGHTCDRPPSWYLFQFHRLLQYARPKPGSPRPFFWMFVDNLVLNKEDLDVASRFLEMEPVTIPDVHGGSLQNAVRVWSNIPAIRSRHWALVSEEELSLLAQNKQSSKLAAKWPTKLVKNCFLPLREYFKYFSTELTSSLGGPSSGAPPPSGGSPAGSPTSTEEGTSESATPESGPGTSTEPSEGSAPGSPAGSPTSTEEGTSTEPSEGSAPGTSTEPSELEDKKYSIGLAIGTNSVGWAVITDEYKVPSKKFKVLGNTDRHSIKKNLIGALLFDSGETAEATRLKRTARRRYTRRKNRICYLQEIFSNEMAKVDDSFFHRLEESFLVEEDKKHERHPIFGNIVDEVAYHEKYPTIYHLRKKLVDSTDKADLRLIYLALAHMIKFRGHFLIEGDLNPDNSDVDKLFIQLVQTYNQLFEENPINASGVDAKAILSARLSKSRRLENLIAQLPGEKKNGLFGNLIALSLGLTPNFKSNFDLAEDAKLQLSKDTYDDDLDNLLAQIGDQYADLFLAAKNLSDAILLSDILRVNTEITKAPLSASMIKRYDEHHQDLTLLKALVRQQLPEKYKEIFFDQSKNGYAGYIDGGASQEEFYKFIKPILEKMDGTEELLVKLNREDLLRKQRTFDNGSIPHQIHLGELHAILRRQEDFYPFLKDNREKIEKILTFRIPYYVGPLARGNSRFAWMTRKSEETITPWNFEEVVDKGASAQSFIERMTNFDKNLPNEKVLPKHSLLYEYFTVYNELTKVKYVTEGMRKPAFLSGEQKKAIVDLLFKTNRKVTVKQLKEDYFKKIECFDSVEISGVEDRFNASLGTYHDLLKIIKDKDFLDNEENEDILEDIVLTLTLFEDREMIEERLKTYAHLFDDKVMKQLKRRRYTGWGRLSRKLINGIRDKQSGKTILDFLKSDGFANRNFMQLIHDDSLTFKEDIQKAQVSGQGDSLHEHIANLAGSPAIKKGILQTVKVVDELVKVMGRHKPENIVIEMARENQTTQKGQKNSRERMKRIEEGIKELGSQILKEHPVENTQLQNEKLYLYYLQNGRDMYVDQELDINRLSDYDVDAIVPQSFLKDDSIDNKVLTRSDKNRGKSDNVPSEEVVKKMKNYWRQLLNAKLITQRKFDNLTKAERGGLSELDKAGFIKRQLVETRQITKHVAQILDSRMNTKYDENDKLIREVKVITLKSKLVSDFRKDFQFYKVREINNYHHAHDAYLNAVVGTALIKKYPKLESEFVYGDYKVYDVRKMIAKSEQEIGKATAKYFFYSNIMNFFKTEITLANGEIRKRPLIETNGETGEIVWDKGRDFATVRKVLSMPQVNIVKKTEVQTGGFSKESILPKRNSDKLIARKKDWDPKKYGGFDSPTVAYSVLVVAKVEKGKSKKLKSVKELLGITIMERSSFEKNPIDFLEAKGYKEVKKDLIIKLPKYSLFELENGRKRMLASAGELQKGNELALPSKYVNFLYLASHYEKLKGSPEDNEQKQLFVEQHKHYLDEIIEQISEFSKRVILADANLDKVLSAYNKHRDKPIREQAENIIHLFTLTNLGAPAAFKYFDTTIDRKRYTSTKEVLDATLIHQSITGLYETRIDLSQLGGDSPKKKRKVGVDGSSGSETPGTSESATPESTGDSVAFEDVAVNFTLEEWALLDPSQKNLYRDVMRETFRNLASVGKQWEDQNIEDPFKIPRRNISHIPERLCESKEGGQGEESADYKDDDDKAPKKKRKVPKKKRKV

SEQ ID NO: 482 - DNA, 6948 bp, synthetic construct
  source 1..6948: mol_type = other DNA
atgccaaaaaagaagagaaaggtaccgaagaaaaaaagaaaggtatacaatcacgatcaggagttcgacccccctaaggtgtacccaccagtgcctgcagagaagaggaagccaatccgggtgctgagcctgtttgatggcatcgccaccggcctgctggtgctgaaggatctgggcatccaggtggaccggtacatcgcctccgaggtgtgcgaggattctatcaccgtgggcatggtgcgccaccagggcaagatcatgtatgtgggcgacgtgcggtccgtgacacagaagcacatccaggagtggggcccattcgatctggtgatcggcggcagcccctgtaatgacctgtccatcgtgaaccctgcaaggaagggactgtacgagggaaccggccggctgttctttgagttttatagactgctgcacgacgccaggcctaaggagggcgacgatagaccattcttttggctgttcgagaatgtggtggctatgggcgtgagcgataagagggacatctccaggtttctggagtctaaccccgtgatgatcgatgcaaaggaggtgtccgccgcacacagagccaggtatttctggggcaatctgccaggaatgaacaggccactggcaagcaccgtgaatgacaagctggagctgcaggagtgcctggagcacggaaggatcgccaagttttccaaggtgcgcacaatcaccacacggagcaattccatcaagcagggcaaggatcagcacttccccgtgttcatgaacgagaaggaggacatcctgtggtgtaccgagatggagagagtgttcggctttccagtgcactacacagacgtgtctaacatgagcaggctggcaaggcagcggctgctgggcagatcttggagcgtgcccgtgatcaggcacctgttcgcccctctgaaggagtattttgcctgcgtgagcagcggcaactccaatgccaacagccggggcccctctttcagctccggattggtgcctctgagcctgaggggctcccacatggcagcaatccccgccctggaccccgaggccgagcctagcatggacgtgatcctggtgggctctagcgagctgtcctctagcgtgtctccaggaaccggaagggatctgatcgcatacgaggtgaaggccaatcagcggaacatcgaggacatctgtatctgctgtggcagcctgcaggtgcacacacagcacccactgttcgagggaggaatctgcgcaccctgtaaggataagttcctggacgccctgtttctgtacgacgatgacggctaccagtcctattgctctatctgctgttccggcgagaccctgctgatctgcggcaatccagattgtacaaggtgctattgttttgagtgcgtggactctctggtgggaccaggcaccagcggaaaggtgcacgccatgtccaactgggtgtgctacctgtgcctgccatcctctcgcagcggactgctgcagcggagaaggaagtggagatcccagctgaaggccttctatgatagggagtctgagaaccccctggagatgtttgagaccgtgccagtgtggcgccggcagcccgtgagggtgctgagcctgttcgaggatatcaagaaggagctgacatccctgggctttctggagtccggctctgaccccggacagctgaagcacgtggtggatgtgaccgacacagtgcggaaggatgtggaggagtggggccctttcgacctggtgtacggagcaacccctccactgggacacacatgcgacagacccccttcttggtacctgttccagtttcaccgcctgctgcagtatgcaaggccaaagccaggcagccctagaccattcttttggatgttcgtggataatctggtgctgaacaaggaggatctggacgtggccagcaggtttctggagatggagccagtgaccatcccagacgtgcacggcggctccctgcagaatgccgtgcgcgtgtggtctaacatccctgccatcagaagcaggcactgggcactggtgagcgaggaggagctgtccctgctggcccagaataagcagagcagcaagctggccgccaagtggcctacaaagctggtgaagaactgcttcctgccactgcgggagtacttcaagtatttttccaccgagctgacatctagcctgggaggaccctcctctggcgccccaccacctagcggcggctcccctgccggctctccaaccagcacagaggagggcaccagcgagtccgccacaccagagtctggacctggcaccagcacagagccatccgagggctctgccccaggctctcctgcaggcagccctacctccaccgaagagggcaccagcacagagccttctgagggcagcgccccaggcacctctacagagccaagcgagctcgaggacaagaagtacagcatcggcctggccatcggcaccaactctgtgggctgggccgtgatcaccgacgagtacaaggtgcccagcaagaaattcaaggtgctgggcaacaccgaccggcacagcatcaagaagaacctgatcggagccctgctgttcgacagcggcgaaacagccgaggccacccggctgaagagaaccgccagaagaagatacaccagacggaagaaccggatctgctatctgcaagagatcttcagcaacgagatggccaaggtggacgacagcttcttccacagactggaagagtccttcctggtggaagaggataagaagcacgagcggcaccccatcttcggcaacatcgtggacgaggtggcctaccacgagaagtaccccaccatctaccacctgagaaagaaactggtggacagcaccgacaaggccgacctgcggctgatctatctggccctggcccacatgatcaagttccggggccacttcctgatcgagggcgacctgaaccccgacaacagcgacgtggacaagctgttcatccagctggtgcagacctacaaccagctgttcgaggaaaaccccatcaacgccagcggcgtggacgccaaggccatcctgtctgccagactgagcaagagcagacggctggaaaatctgatcgcccagctgcccggcgagaagaagaatggcctgttcggcaacctgattgccctgagcctgggcctgacccccaacttcaagagcaacttcgacctggccgaggatgccaaactgcagctgagcaaggacacctacgacgacgacctggacaacctgctggcccagatcggcgaccagtacgccgacctgtttctggccgccaagaacctgtccgacgccatcctgctgagcgacatcctgagagtgaacaccgagatcaccaaggcccccctgagcgcctctatgatcaagagatacgacgagcaccaccaggacctgaccctgctgaaagctctcgtgcggcagcagctgcctgagaagtacaaagagattttcttcgaccagagcaagaacggctacgccggctacattgacggcggagccagccaggaagagttctacaagttcatcaagcccatcctggaaaagatggacggcaccgaggaactgctcgtgaagctgaacagagaggacctgctgcggaagcagcggaccttcgacaacggcagcatcccccaccagatccacctgggagagctgcacgccattctgcggcggcaggaagatttttacccattcctgaaggacaaccgggaaaagatcgagaagatcctgaccttccgcatcccctactacgtgggccctctggccaggggaaacagcagattcgcctggatgaccagaaagagcgaggaaaccatcaccccctggaacttcgaggaagtggtggacaagggcgcttccgcccagagcttcatcgagcggatgaccaacttcgataagaacctgcccaacgagaaggtgctgcccaagcacagcctgctgtacgagtacttcaccgtgtataacgagctgaccaaagtgaaatacgtgaccgagggaatgagaaagcccgccttcctgagcggcgagcagaaaaaggccatcgtggacctgctgttcaagaccaaccggaaagtgaccgtgaagcagctgaaagaggactacttcaagaaaatcgagtgcttcgactccgtggaaatctccggcgtggaagatcggttcaacgcctccctgggcacataccacgatctgctgaaaattatcaaggacaaggacttcctggacaatgaggaaaacgaggacattctggaagatatcgtgctgaccctgacactgtttgaggacagagagatgatcgaggaacggctgaaaacctatgcccacctgttcgacgacaaagtgatgaagcagctgaagcggcggagatacaccggctggggcaggctgagccggaagctgatcaacggcatccgggacaagcagtccggcaagacaatcctggatttcctgaagtccgacggcttcgccaacagaaacttcatgcagctgatccacgacgacagcctgacctttaaagaggacatccagaaagcccaggtgtccggccagggcgatagcctgcacgagcacattgccaatctggccggcagccccgccattaagaagggcatcctgcagacagtgaaggtggtggacgagctcgtgaaagtgatgggccggcacaagcccgagaacatcgtgatcgaaatggccagagagaaccagaccacccagaagggacagaagaacagccgcgagagaatgaagcggatcgaagagggcatcaaagagctgggcagccagatcctgaaagaacaccccgtggaaaacacccagctgcagaacgagaagctgtacctgtactacctgcagaatgggcgggatatgtacgtggaccaggaactggacatcaaccggctgtccgactacgatgtggacgccatcgtgcctcagagctttctgaaggacgactccatcgacaacaaggtgctgaccagaagcgacaagaaccggggcaagagcgacaacgtgccctccgaagaggtcgtgaagaagatgaagaactactggcggcagctgctgaacgccaagctgattacccagagaaagttcgacaatctgaccaaggccgagagaggcggcctgagcgaactggataaggccggcttcatcaagagacagctggtggaaacccggcagatcacaaagcacgtggcacagatcctggactcccggatgaacactaagtacgacgagaatgacaagctgatccgggaagtgaaagtgatcaccctgaagtccaagctggtgtccgatttccggaaggatttccagttttacaaagtgcgcgagatcaacaactaccaccacgcccacgacgcctacctgaacgccgtcgtgggaaccgccctgatcaaaaagtaccctaagctggaaagcgagttcgtgtacggcgactacaaggtgtacgacgtgcggaagatgatcgccaagagcgagcaggaaatcggcaaggctaccgccaagtacttcttctacagcaacatcatgaactttttcaagaccgagattaccctggccaacggcgagatccggaagcggcctctgatcgagacaaacggcgaaaccggggagatcgtgtgggataagggccgggattttgccaccgtgcggaaagtgctgagcatgccccaagtgaatatcgtgaaaaagaccgaggtgcagacaggcggcttcagcaaagagtctatcctgcccaagaggaacagcgataagctgatcgccagaaagaaggactgggaccctaagaagtacggcggcttcgacagccccaccgtggcctattctgtgctggtggtggccaaagtggaaaagggcaagtccaagaaactgaagagtgtgaaagagctgctggggatcaccatcatggaaagaagcagcttcgagaagaatcccatcgactttctggaagccaagggctacaaagaagtgaaaaaggacctgatcatcaagctgcctaagtactccctgttcgagctggaaaacggccggaagagaatgctggcctctgccggcgaactgcagaagggaaacgaactggccctgccctccaaatatgtgaacttcctgtacctggccagccactatgagaagctgaagggctcccccgaggataatgagcagaaacagctgtttgtggaacagcacaagcactacctggacgagatcatcgagcagatcagcgagttctccaagagagtgatcctggccgacgctaatctggacaaagtgctgtccgcctacaacaagcaccgggataagcccatcagagagcaggccgagaatatcatccacctgtttaccctgaccaatctgggagcccctgccgccttcaagtactttgacaccaccatcgaccggaagaggtacaccagcaccaaagaggtgctggacgccaccctgatccaccagagcatcaccggcctgtacgagacacggatcgacctgtctcagctgggaggcgacagccccaagaagaagagaaaggtgggagtcgacggatccagcggctccgagaccccaggcacatctgagagcgccacccctgagtccaccggtgactccgttgctttcgaggacgtggccgtgaacttcacacttgaggaatgggccttgctcgacccaagtcagaagaatctgtacagagacgtgatgcgggagacattcaggaatctcgccagtgtcggaaagcagtgggaagaccagaacatcgaagatcctttcaagataccacggcgcaatatctcccacattcctgagaggctgtgtgaatctaaggaaggcggacaaggtgaggaaagcgctgattacaaagatgatgacgataaagcccccaagaagaaaaggaaggtcccaaagaaaaaaagaaaggtgtga

SEQ ID NO: 483 - protein, 2335 aa, synthetic construct
MPKKKRKVPKKKRKVYNHDQEFDPPKVYPPVPAEKRKPIRVLSLFDGIATGLLVLKDLGIQVDRYIASEVCEDSITVGMVRHQGKIMYVGDVRSVTQKHIQEWGPFDLVIGGSPCNDLSIVNPARKGLYEGTGRLFFEFYRLLHDARPKEGDDRPFFWLFENVVAMGVSDKRDISRFLESNPVMIDAKEVSAAHRARYFWGNLPGMNRPLASTVNDKLELQECLEHGRIAKFSKVRTITTRSNSIKQGKDQHFPVFMNEKEDILWCTEMERVFGFPVHYTDVSNMSRLARQRLLGRSWSVPVIRHLFAPLKEYFACVSSGNSNANSRGPSFSSGLVPLSLRGSHMAAIPALDPEAEPSMDVILVGSSELSSSVSPGTGRDLIAYEVKANQRNIEDICICCGSLQVHTQHPLFEGGICAPCKDKFLDALFLYDDDGYQSYCSICCSGETLLICGNPDCTRCYCFECVDSLVGPGTSGKVHAMSNWVCYLCLPSSRSGLLQRRRKWRSQLKAFYDRESENPLEMFETVPVWRRQPVRVLSLFEDIKKELTSLGFLESGSDPGQLKHVVDVTDTVRKDVEEWGPFDLVYGATPPLGHTCDRPPSWYLFQFHRLLQYARPKPGSPRPFFWMFVDNLVLNKEDLDVASRFLEMEPVTIPDVHGGSLQNAVRVWSNIPAIRSRHWALVSEEELSLLAQNKQSSKLAAKWPTKLVKNCFLPLREYFKYFSTELTSSLGGPSSGAPPPSGGSPAGSPTSTEEGTSESATPESGPGTSTEPSEGSAPGSPAGSPTSTEEGTSTEPSEGSAPGTSTEPSELEDKKYSIGLAIGTNSVGWAVITDEYKVPSKKFKVLGNTDRHSIKKNLIGALLFDSGETAEATRLKRTARRRYTRRKNRICYLQEIFSNEMAKVDDSFFHRLEESFLVEEDKKHERHPIFGNIVDEVAYHEKYPTIYHLRKKLVDSTDKADLRLIYLALAHMIKFRGHFLIEGDLNPDNSDVDKLFIQLVQTYNQLFEENPINASGVDAKAILSARLSKSRRLENLIAQLPGEKKNGLFGNLIALSLGLTPNFKSNFDLAEDAKLQLSKDTYDDDLDNLLAQIGDQYADLFLAAKNLSDAILLSDILRVNTEITKAPLSASMIKRYDEHHQDLTLLKALVRQQLPEKYKEIFFDQSKNGYAGYIDGGASQEEFYKFIKPILEKMDGTEELLVKLNREDLLRKQRTFDNGSIPHQIHLGELHAILRRQEDFYPFLKDNREKIEKILTFRIPYYVGPLARGNSRFAWMTRKSEETITPWNFEEVVDKGASAQSFIERMTNFDKNLPNEKVLPKHSLLYEYFTVYNELTKVKYVTEGMRKPAFLSGEQKKAIVDLLFKTNRKVTVKQLKEDYFKKIECFDSVEISGVEDRFNASLGTYHDLLKIIKDKDFLDNEENEDILEDIVLTLTLFEDREMIEERLKTYAHLFDDKVMKQLKRRRYTGWGRLSRKLINGIRDKQSGKTILDFLKSDGFANRNFMQLIHDDSLTFKEDIQKAQVSGQGDSLHEHIANLAGSPAIKKGILQTVKVVDELVKVMGRHKPENIVIEMARENQTTQKGQKNSRERMKRIEEGIKELGSQILKEHPVENTQLQNEKLYLYYLQNGRDMYVDQELDINRLSDYDVDAIVPQSFLKDDSIDNKVLTRSDKNRGKSDNVPSEEVVKKMKNYWRQLLNAKLITQRKFDNLTKAERGGLSELDKAGFIKRQLVETRQITKHVAQILDSRMNTKYDENDKLIREVKVITLKSKLVSDFRKDFQFYKVREINNYHHAHDAYLNAVVGTALIKKYPKLESEFVYGDYKVYDVRKMIAKSEQEIGKATAKYFFYSNIMNFFKTEITLANGEIRKRPLIETNGETGEIVWDKGRDFATVRKVLSMPQVNIVKKTEVQTGGFSKESILPKRNSDKLIARKKDWDPKKYGGFDSPTVAYSVLVVAKVEKGKSKKLKSVKELLGITIMERSSFEKNPIDFLEAKGYKEVKKDLIIKLPKYSLFELENGRKRMLASAGELQKGNELALPSKYVNFLYLASHYEKLKGSPEDNEQKQLFVEQHKHYLDEIIEQISEFSKRVILADANLDKVLSAYNKHRDKPIREQAENIIHLFTLTNLGAPAAFKYFDTTIDRKRYTSTKEVLDATLIHQSITGLYETRIDLSQLGGDSPKKKRKVGVDGSSGSETPGTSESATPESTGMNNSQGRVTFEDVTVNFTQGEWQRLNPEQRNLYRDVMLENYSNLVSVGQGETTKPDVILRLEQGKEPWLEEEEVLGSGRAEKNGDIGGQIWKPKDVKESLSADYKDDDDKAPKKKRKVPKKKRKV

SEQ ID NO: 484 - DNA, 7008 bp, synthetic construct
  source 1..7008: mol_type = other DNA
atgccaaaaaagaagagaaaggtaccgaagaaaaaaagaaaggtatacaatcacgatcaggagttcgacccccctaaggtgtacccaccagtgcctgcagagaagaggaagccaatccgggtgctgagcctgtttgatggcatcgccaccggcctgctggtgctgaaggatctgggcatccaggtggaccggtacatcgcctccgaggtgtgcgaggattctatcaccgtgggcatggtgcgccaccagggcaagatcatgtatgtgggcgacgtgcggtccgtgacacagaagcacatccaggagtggggcccattcgatctggtgatcggcggcagcccctgtaatgacctgtccatcgtgaaccctgcaaggaagggactgtacgagggaaccggccggctgttctttgagttttatagactgctgcacgacgccaggcctaaggagggcgacgatagaccattcttttggctgttcgagaatgtggtggctatgggcgtgagcgataagagggacatctccaggtttctggagtctaaccccgtgatgatcgatgcaaaggaggtgtccgccgcacacagagccaggtatttctggggcaatctgccaggaatgaacaggccactggcaagcaccgtgaatgacaagctggagctgcaggagtgcctggagcacggaaggatcgccaagttttccaaggtgcgcacaatcaccacacggagcaattccatcaagcagggcaaggatcagcacttccccgtgttcatgaacgagaaggaggacatcctgtggtgtaccgagatggagagagtgttcggctttccagtgcactacacagacgtgtctaacatgagcaggctggcaaggcagcggctgctgggcagatcttggagcgtgcccgtgatcaggcacctgttcgcccctctgaaggagtattttgcctgcgtgagcagcggcaactccaatgccaacagccggggcccctctttcagctccggattggtgcctctgagcctgaggggctcccacatggcagcaatccccgccctggaccccgaggccgagcctagcatggacgtgatcctggtgggctctagcgagctgtcctctagcgtgtctccaggaaccggaagggatctgatcgcatacgaggtgaaggccaatcagcggaacatcgaggacatctgtatctgctgtggcagcctgcaggtgcacacacagcacccactgttcgagggaggaatctgcgcaccctgtaaggataagttcctggacgccctgtttctgtacgacgatgacggctaccagtcctattgctctatctgctgttccggcgagaccctgctgatctgcggcaatccagattgtacaaggtgctattgttttgagtgcgtggactctctggtgggaccaggcaccagcggaaaggtgcacgccatgtccaactgggtgtgctacctgtgcctgccatcctctcgcagcggactgctgcagcggagaaggaagtggagatcccagctgaaggccttctatgatagggagtctgagaaccccctggagatgtttgagaccgtgccagtgtggcgccggcagcccgtgagggtgctgagcctgttcgaggatatcaagaaggagctgacatccctgggctttctggagtccggctctgaccccggacagctgaagcacgtggtggatgtgaccgacacagtgcggaaggatgtggaggagtggggccctttcgacctggtgtacggagcaacccctccactgggacacacatgcgacagacccccttcttggtacctgttccagtttcaccgcctgctgcagtatgcaaggccaaagccaggcagccctagaccattcttttggatgttcgtggataatctggtgctgaacaaggaggatctggacgtggccagcaggtttctggagatggagccagtgaccatcccagacgtgcacggcggctccctgcagaatgccgtgcgcgtgtggtctaacatccctgccatcagaagcaggcactgggcactggtgagcgaggaggagctgtccctgctggcccagaataagcagagcagcaagctggccgccaagtggcctacaaagctggtgaagaactgcttcctgccactgcgggagtacttcaagtatttttccaccgagctgacatctagcctgggaggaccctcctctggcgccccaccacctagcggcggctcccctgccggctctccaaccagcacagaggagggcaccagcgagtccgccacaccagagtctggacctggcaccagcacagagccatccgagggctctgccccaggctctcctgcaggcagccctacctccaccgaagagggcaccagcacagagccttctgagggcagcgccccaggcacctctacagagccaagcgagctcgaggacaagaagtacagcatcggcctggccatcggcaccaactctgtgggctgggccgtgatcaccgacgagtacaaggtgcccagcaagaaattcaaggtgctgggcaacaccgaccggcacagcatcaagaagaacctgatcggagccctgctgttcgacagcggcgaaacagccgaggccacccggctgaagagaaccgccagaagaagatacaccagacggaagaaccggatctgctatctgcaagagatcttcagcaacgagatggccaaggtggacgacagcttcttccacagactggaagagtccttcctggtggaagaggataagaagcacgagcggcaccccatcttcggcaacatcgtggacgaggtggcctaccacgagaagtaccccaccatctaccacctgagaaagaaactggtggacagcaccgacaaggccgacctgcggctgatctatctggccctggcccacatgatcaagttccggggccacttcctgatcgagggcgacctgaaccccgacaacagcgacgtggacaagctgttcatccagctggtgcagacctacaaccagctgttcgaggaaaaccccatcaacgccagcggcgtggacgccaaggccatcctgtctgccagactgagcaagagcagacggctggaaaatctgatcgcccagctgcccggcgagaagaagaatggcctgttcggcaacctgattgccctgagcctgggcctgacccccaacttcaagagcaacttcgacctggccgaggatgccaaactgcagctgagcaaggacacctacgacgacgacctggacaacctgctggcccagatcggcgaccagtacgccgacctgtttctggccgccaagaacctgtccgacgccatcctgctgagcgacatcctgagagtgaacaccgagatcaccaaggcccccctgagcgcctctatgatcaagagatacgacgagcaccaccaggacctgaccctgctgaaagctctcgtgcggcagcagctgcctgagaagtacaaagagattttcttcgaccagagcaagaacggctacgccggctacattgacggcggagccagccaggaagagttctacaagttcatcaagcccatcctggaaaagatggacggcaccgaggaactgctcgtgaagctgaacagagaggacctgctgcggaagcagcggaccttcgacaacggcagcatcccccaccagatccacctgggagagctgcacgccattctgcggcggcaggaagatttttacccattcctgaaggacaaccgggaaaagatcgagaagatcctgaccttccgcatcccctactacgtgggccctctggccaggggaaacagcagattcgcctggatgaccagaaagagcgaggaaaccatcaccccctggaacttcgaggaagtggtggacaagggcgcttccgcccagagcttcatcgagcggatgaccaacttcgataagaacctgcccaacgagaaggtgctgcccaagcacagcctgctgtacgagtacttcaccgtgtataacgagctgaccaaagtgaaatacgtgaccgagggaatgagaaagcccgccttcctgagcggcgagcagaaaaaggccatcgtggacctgctgttcaagaccaaccggaaagtgaccgtgaagcagctgaaagaggactacttcaagaaaatcgagtgcttcgactccgtggaaatctccggcgtggaagatcggttcaacgcctccctgggcacataccacgatctgctgaaaattatcaaggacaaggacttcctggacaatgaggaaaacgaggacattctggaagatatcgtgctgaccctgacactgtttgaggacagagagatgatcgaggaacggctgaaaacctatgcccacctgttcgacgacaaagtgatgaagcagctgaagcggcggagatacaccggctggggcaggctgagccggaagctgatcaacggcatccgggacaagcagtccggcaagacaatcctggatttcctgaagtccgacggcttcgccaacagaaacttcatgcagctgatccacgacgacagcctgacctttaaagaggacatccagaaagcccaggtgtccggccagggcgatagcctgcacgagcacattgccaatctggccggcagccccgccattaagaagggcatcctgcagacagtgaaggtggtggacgagctcgtgaaagtgatgggccggcacaagcccgagaacatcgtgatcgaaatggccagagagaaccagaccacccagaagggacagaagaacagccgcgagagaatgaagcggatcgaagagggcatcaaagagctgggcagccagatcctgaaagaacaccccgtggaaaacacccagctgcagaacgagaagctgtacctgtactacctgcagaatgggcgggatatgtacgtggaccaggaactggacatcaaccggctgtccgactacgatgtggacgccatcgtgcctcagagctttctgaaggacgactccatcgacaacaaggtgctgaccagaagcgacaagaaccggggcaagagcgacaacgtgccctccgaagaggtcgtgaagaagatgaagaactactggcggcagctgctgaacgccaagctgattacccagagaaagttcgacaatctgaccaaggccgagagaggcggcctgagcgaactggataaggccggcttcatcaagagacagctggtggaaacccggcagatcacaaagcacgtggcacagatcctggactcccggatgaacactaagtacgacgagaatgacaagctgatccgggaagtgaaagtgatcaccctgaagtccaagctggtgtccgatttccggaaggatttccagttttacaaagtgcgcgagatcaacaactaccaccacgcccacgacgcctacctgaacgccgtcgtgggaaccgccctgatcaaaaagtaccctaagctggaaagcgagttcgtgtacggcgactacaaggtgtacgacgtgcggaagatgatcgccaagagcgagcaggaaatcggcaaggctaccgccaagtacttcttctacagcaacatcatgaactttttcaagaccgagattaccctggccaacggcgagatccggaagcggcctctgatcgagacaaacggcgaaaccggggagatcgtgtgggataagggccgggattttgccaccgtgcggaaagtgctgagcatgccccaagtgaatatcgtgaaaaagaccgaggtgcagacaggcggcttcagcaaagagtctatcctgcccaagaggaacagcgataagctgatcgccagaaagaaggactgggaccctaagaagtacggcggcttcgacagccccaccgtggcctattctgtgctggtggtggccaaagtggaaaagggcaagtccaagaaactgaagagtgtgaaagagctgctggggatcaccatcatggaaagaagcagcttcgagaagaatcccatcgactttctggaagccaagggctacaaagaagtgaaaaaggacctgatcatcaagctgcctaagtactccctgttcgagctggaaaacggccggaagagaatgctggcctctgccggcgaactgcagaagggaaacgaactggccctgccctccaaatatgtgaacttcctgtacctggccagccactatgagaagctgaagggctcccccgaggataatgagcagaaacagctgtttgtggaacagcacaagcactacctggacgagatcatcgagcagatcagcgagttctccaagagagtgatcctggccgacgctaatctggacaaagtgctgtccgcctacaacaagcaccgggataagcccatcagagagcaggccgagaatatcatccacctgtttaccctgaccaatctgggagcccctgccgccttcaagtactttgacaccaccatcgaccggaagaggtacaccagcaccaaagaggtgctggacgccaccctgatccaccagagcatcaccggcctgtacgagacacggatcgacctgtctcagctgggaggcgacagccccaagaagaagagaaaggtgggagtcgacggatccagcggctccgagaccccaggcacatctgagagcgccacccctgagtccaccggtatgaacaattcacaggggagagtgacattcgaagacgtgaccgtgaacttcacccagggagaatggcagcgcttgaacccagaacaaaggaacctctatcgggacgtgatgctggaaaactactcaaatttggtgagcgttgggcagggtgagaccactaagcctgacgtgatcctgagattggaacagggcaaggagccttggctcgaggaagaggaagtcctgggctcagggagggccgagaaaaacggtgatataggaggccagatatggaagcctaaggacgtcaaggagagcctgagcgctgattacaaagatgatgacgataaagcccccaagaagaaaaggaaggtcccaaagaaaaaaagaaaggtgtga

SEQ ID NO: 485 - protein, 150 aa, synthetic construct
  VARIANT 6..150: note = GGGGS repeats may be deleted
GGGGSGGGGSGGGGSGGGGSGGGGSGGGGSGGGGSGGGGSGGGGSGGGGSGGGGSGGGGSGGGGSGGGGSGGGGSGGGGSGGGGSGGGGSGGGGSGGGGSGGGGSGGGGSGGGGSGGGGSGGGGSGGGGSGGGGSGGGGSGGGGSGGGGS

SEQ ID NO: 486 - protein, 27 aa, synthetic construct
SSGNSNANSRGPSFSSGLVPLSLRGSH

SEQ ID NO: 487 - protein, 150 aa, synthetic construct
  VARIANT 6..150: note = EAAAK repeats may be deleted
EAAAKEAAAKEAAAKEAAAKEAAAKEAAAKEAAAKEAAAKEAAAKEAAAKEAAAKEAAAKEAAAKEAAAKEAAAKEAAAKEAAAKEAAAKEAAAKEAAAKEAAAKEAAAKEAAAKEAAAKEAAAKEAAAKEAAAKEAAAKEAAAKEAAAK

SEQ ID NO: 488 - protein, 120 aa, synthetic construct
  VARIANT 5..120: note = SGGS repeats may be deleted
SGGSSGGSSGGSSGGSSGGSSGGSSGGSSGGSSGGSSGGSSGGSSGGSSGGSSGGSSGGSSGGSSGGSSGGSSGGSSGGSSGGSSGGSSGGSSGGSSGGSSGGSSGGSSGGSSGGSSGGS

SEQ ID NO: 489 - protein, 60 aa, synthetic construct
  VARIANT 3..60: note = XP repeats may be deleted
XPXPXPXPXPXPXPXPXPXPXPXPXPXPXPXPXPXPXPXPXPXPXPXPXPXPXPXPXPXP

SEQ ID NO: 490 - protein, 21 aa, synthetic construct
  VARIANT 4..21: note = 4 or 6 GGS repeats may be deleted
GGSGGSGGSGGSGGSGGSGGS

SEQ ID NO: 491 - protein, 20 aa, synthetic construct
GGGGSGGGGSGGGGSGGGGS

SEQ ID NO: 492 - protein, 2326 aa, synthetic construct
MPKKKRKVPKKKRKVYNHDQEFDPPKVYPPVPAEKRKPIRVLSLFDGIATGLLVLKDLGIQVDRYIASEVCEDSITVGMVRHQGKIMYVGDVRSVTQKHIQEWGPFDLVIGGSPCNDLSIVNPARKGLYEGTGRLFFEFYRLLHDARPKEGDDRPFFWLFENVVAMGVSDKRDISRFLESNPVMIDAKEVSAAHRARYFWGNLPGMNRPLASTVNDKLELQECLEHGRIAKFSKVRTITTRSNSIKQGKDQHFPVFMNEKEDILWCTEMERVFGFPVHYTDVSNMSRLARQRLLGRSWSVPVIRHLFAPLKEYFACVSSGNSNANSRGPSFSSGLVPLSLRGSHMAAIPALDPEAEPSMDVILVGSSELSSSVSPGTGRDLIAYEVKANQRNIEDICICCGSLQVHTQHPLFEGGICAPCKDKFLDALFLYDDDGYQSYCSICCSGETLLICGNPDCTRCYCFECVDSLVGPGTSGKVHAMSNWVCYLCLPSSRSGLLQRRRKWRSQLKAFYDRESENPLEMFETVPVWRRQPVRVLSLFEDIKKELTSLGFLESGSDPGQLKHVVDVTDTVRKDVEEWGPFDLVYGATPPLGHTCDRPPSWYLFQFHRLLQYARPKPGSPRPFFWMFVDNLVLNKEDLDVASRFLEMEPVTIPDVHGGSLQNAVRVWSNIPAIRSRHWALVSEEELSLLAQNKQSSKLAAKWPTKLVKNCFLPLREYFKYFSTELTSSLGGPSSGAPPPSGGSPAGSPTSTEEGTSESATPESGPGTSTEPSEGSAPGSPAGSPTSTEEGTSTEPSEGSAPGTSTEPSELEDKKYSIGLAIGTNSVGWAVITDEYKVPSKKFKVLGNTDRHSIKKNLIGALLFDSGETAEATRLKRTARRRYTRRKNRICYLQEIFSNEMAKVDDSFFHRLEESFLVEEDKKHERHPIFGNIVDEVAYHEKYPTIYHLRKKLVDSTDKADLRLIYLALAHMIKFRGHFLIEGDLNPDNSDVDKLFIQLVQTYNQLFEENPINASGVDAKAILSARLSKSRRLENLIAQLPGEKKNGLFGNLIALSLGLTPNFKSNFDLAEDAKLQLSKDTYDDDLDNLLAQIGDQYADLFLAAKNLSDAILLSDILRVNTEITKAPLSASMIKRYDEHHQDLTLLKALVRQQLPEKYKEIFFDQSKNGYAGYIDGGASQEEFYKFIKPILEKMDGTEELLVKLNREDLLRKQRTFDNGSIPHQIHLGELHAILRRQEDFYPFLKDNREKIEKILTFRIPYYVGPLARGNSRFAWMTRKSEETITPWNFEEVVDKGASAQSFIERMTNFDKNLPNEKVLPKHSLLYEYFTVYNELTKVKYVTEGMRKPAFLSGEQKKAIVDLLFKTNRKVTVKQLKEDYFKKIECFDSVEISGVEDRFNASLGTYHDLLKIIKDKDFLDNEENEDILEDIVLTLTLFEDREMIEERLKTYAHLFDDKVMKQLKRRRYTGWGRLSRKLINGIRDKQSGKTILDFLKSDGFANRNFMQLIHDDSLTFKEDIQKAQVSGQGDSLHEHIANLAGSPAIKKGILQTVKVVDELVKVMGRHKPENIVIEMARENQTTQKGQKNSRERMKRIEEGIKELGSQILKEHPVENTQLQNEKLYLYYLQNGRDMYVDQELDINRLSDYDVDAIVPQSFLKDDSIDNKVLTRSDKNRGKSDNVPSEEVVKKMKNYWRQLLNAKLITQRKFDNLTKAERGGLSELDKAGFIKRQLVETRQITKHVAQILDSRMNTKYDENDKLIREVKVITLKSKLVSDFRKDFQFYKVREINNYHHAHDAYLNAVVGTALIKKYPKLESEFVYGDYKVYDVRKMIAKSEQEIGKATAKYFFYSNIMNFFKTEITLANGEIRKRPLIETNGETGEIVWDKGRDFATVRKVLSMPQVNIVKKTEVQTGGFSKESILPKRNSDKLIARKKDWDPKKYGGFDSPTVAYSVLVVAKVEKGKSKKLKSVKELLGITIMERSSFEKNPIDFLEAKGYKEVKKDLIIKLPKYSLFELENGRKRMLASAGELQKGNELALPSKYVNFLYLASHYEKLKGSPEDNEQKQLFVEQHKHYLDEIIEQISEFSKRVILADANLDKVLSAYNKHRDKPIREQAENIIHLFTLTNLGAPAAFKYFDTTIDRKRYTSTKEVLDATLIHQSITGLYETRIDLSQLGGDSPKKKRKVGVDGSSGSETPGTSESATPESTGMNNSQGRVTFEDVTVNFTQGEWQRLNPEQRNLYRDVMLENYSNLVSVGQGETTKPDVILRLEQGKEPWLEEEEVLGSGRAEKNGDIGGQIWKPKDVKESLSAPKKKRKVPKKKRKV

SEQ ID NO: 493 - DNA, 10942 bp, synthetic construct
  source 1..10942: mol_type = other DNA
gggcgctcgagcaggttcagaaggagatcaaaaacccccaaggatcaaacatgccaaaaaagaagagaaaggtaccgaagaaaaaaagaaaggtatacaatcacgatcaggagttcgacccccctaaggtgtacccaccagtgcctgcagagaagaggaagccaatccgggtgctgagcctgtttgatggcatcgccaccggcctgctggtgctgaaggatctgggcatccaggtggaccggtacatcgcctccgaggtgtgcgaggattctatcaccgtgggcatggtgcgccaccagggcaagatcatgtatgtgggcgacgtgcggtccgtgacacagaagcacatccaggagtggggcccattcgatctggtgatcggcggcagcccctgtaatgacctgtccatcgtgaaccctgcaaggaagggactgtacgagggaaccggccggctgttctttgagttttatagactgctgcacgacgccaggcctaaggagggcgacgatagaccattcttttggctgttcgagaatgtggtggctatgggcgtgagcgataagagggacatctccaggtttctggagtctaaccccgtgatgatcgatgcaaaggaggtgtccgccgcacacagagccaggtatttctggggcaatctgccaggaatgaacaggccactggcaagcaccgtgaatgacaagctggagctgcaggagtgcctggagcacggaaggatcgccaagttttccaaggtgcgcacaatcaccacacggagcaattccatcaagcagggcaaggatcagcacttccccgtgttcatgaacgagaaggaggacatcctgtggtgtaccgagatggagagagtgttcggctttccagtgcactacacagacgtgtctaacatgagcaggctggcaaggcagcggctgctgggcagatcttggagcgtgcccgtgatcaggcacctgttcgcccctctgaaggagtattttgcctgcgtgagcagcggcaactccaatgccaacagccggggcccctctttcagctccggattggtgcctctgagcctgaggggctcccacatggcagcaatccccgccctggaccccgaggccgagcctagcatggacgtgatcctggtgggctctagcgagctgtcctctagcgtgtctccaggaaccggaagggatctgatcgcatacgaggtgaaggccaatcagcggaacatcgaggacatctgtatctgctgtggcagcctgcaggtgcacacacagcacccactgttcgagggaggaatctgcgcaccctgtaaggataagttcctggacgccctgtttctgtacgacgatgacggctaccagtcctattgctctatctgctgttccggcgagaccctgctgatctgcggcaatccagattgtacaaggtgctattgttttgagtgcgtggactctctggtgggaccaggcaccagcggaaaggtgcacgccatgtccaactgggtgtgctacctgtgcctgccatcctctcgcagcggactgctgcagcggagaaggaagtggagatcccagctgaaggccttctatgatagggagtctgagaaccccctggagatgtttgagaccgtgccagtgtggcgccggcagcccgtgagggtgctgagcctgttcgaggatatcaagaaggagctgacatccctgggctttctggagtccggctctgaccccggacagctgaagcacgtggtggatgtgaccgacacagtgcggaaggatgtggaggagtggggccctttcgacctggtgtacggagcaacccctccactgggacacacatgcgacagacccccttcttggtacctgttccagtttcaccgcctgctgcagtatgcaaggccaaagccaggcagccctagaccattcttttggatgttcgtggataatctggtgctgaacaaggaggatctggacgtggccagcaggtttctggagatggagccagtgaccatcccagacgtgcacggcggctccctgcagaatgccgtgcgcgtgtggtctaacatccctgccatcagaagcaggcactgggcactggtgagcgaggaggagctgtccctgctggcccagaataagcagagcagcaagctggccgccaagtggcctacaaagctggtgaagaactgcttcctgccactgcgggagtacttcaagtatttttccaccgagctgacatctagcctgggaggaccctcctctggcgccccaccacctagcggcggctcccctgccggctctccaaccagcacagaggagggcaccagcgagtccgccacaccagagtctggacctggcaccagcacagagccatccgagggctctgccccaggctctcctgcaggcagccctacctccaccgaagagggcaccagcacagagccttctgagggcagcgccccaggcacctctacagagccaagcgagctcgaggacaagaagtacagcatcggcctggccatcggcaccaactctgtgggctgggccgtgatcaccgacgagtacaaggtgcccagcaagaaattcaaggtgctgggcaacaccgaccggcacagcatcaagaagaacctgatcggagccctgctgttcgacagcggcgaaacagccgaggccacccggctgaagagaaccgccagaagaagatacaccagacggaagaaccggatctgctatctgcaagagatcttcagcaacgagatggccaaggtggacgacagcttcttccacagactggaagagtccttcctggtggaagaggataagaagcacgagcggcaccccatcttcggcaacatcgtggacgaggtggcctaccacgagaagtaccccaccatctaccacctgagaaagaaactggtggacagcaccgacaaggccgacctgcggctgatctatctggccctggcccacatgatcaagttccggggccacttcctgatcgagggcgacctgaaccccgacaacagcgacgtggacaagctgttcatccagctggtgcagacctacaaccagctgttcgaggaaaaccccatcaacgccagcggcgtggacgccaaggccatcctgtctgccagactgagcaagagcagacggctggaaaatctgatcgcccagctgcccggcgagaagaagaatggcctgttcggcaacctgattgccctgagcctgggcctgacccccaacttcaagagcaacttcgacctggccgaggatgccaaactgcagctgagcaaggacacctacgacgacgacctggacaacctgctggcccagatcggcgaccagtacgccgacctgtttctggccgccaagaacctgtccgacgccatcctgctgagcgacatcctgagagtgaacaccgagatcaccaaggcccccctgagcgcctctatgatcaagagatacgacgagcaccaccaggacctgaccctgctgaaagctctcgtgcggcagcagctgcctgagaagtacaaagagattttcttcgaccagagcaagaacggctacgccggctacattgacggcggagccagccaggaagagttctacaagttcatcaagcccatcctggaaaagatggacggcaccgaggaactgctcgtgaagctgaacagagaggacctgctgcggaagcagcggaccttcgacaacggcagcatcccccaccagatccacctgggagagctgcacgccattctgcggcggcaggaagatttttacccattcctgaaggacaaccgggaaaagatcgagaagatcctgaccttccgcatcccctactacgtgggccctctggccaggggaaacagcagattcgcctggatgaccagaaagagcgaggaaaccatcaccccctggaacttcgaggaagtggtggacaagggcgcttccgcccagagcttcatcgagcggatgaccaacttcgataagaacctgcccaacgagaaggtgctgcccaagcacagcctgctgtacgagtacttcaccgtgtataacgagctgaccaaagtgaaatacgtgaccgagggaatgagaaagcccgccttcctgagcggcgagcagaaaaaggccatcgtggacctgctgttcaagaccaaccggaaagtgaccgtgaagcagctgaaagaggactacttcaagaaaatcgagtgcttcgactccgtggaaatctccggcgtggaagatcggttcaacgcctccctgggcacataccacgatctgctgaaaattatcaaggacaaggacttcctggacaatgaggaaaacgaggacattctggaagatatcgtgctgaccctgacactgtttgaggacagagagatgatcgaggaacggctgaaaacctatgcccacctgttcgacgacaaagtgatgaagcagctgaagcggcggagatacaccggctggggcaggctgagccggaagctgatcaacggcatccgggacaagcagtccggcaagacaatcctggatttcctgaagtccgacggcttcgccaacagaaacttcatgcagctgatccacgacgacagcctgacctttaaagaggacatccagaaagcccaggtgtccggccagggcgatagcctgcacgagcacattgccaatctggccggcagccccgccattaagaagggcatcctgcagacagtgaaggtggtggacgagctcgtgaaagtgatgggccggcacaagcccgagaacatcgtgatcgaaatggccagagagaaccagaccacccagaagggacagaagaacagccgcgagagaatgaagcggatcgaagagggcatcaaagagctgggcagccagatcctgaaagaacaccccgtggaaaacacccagctgcagaacgagaagctgtacctgtactacctgcagaatgggcgggatatgtacgtggaccaggaactggacatcaaccggctgtccgactacgatgtggacgccatcgtgcctcagagctttctgaaggacgactccatcgacaacaaggtgctgaccagaagcgacaagaaccggggcaagagcgacaacgtgccctccgaagaggtcgtgaagaagatgaagaactactggcggcagctgctgaacgccaagctgattacccagagaaagttcgacaatctgaccaaggccgagagaggcggcctgagcgaactggataaggccggcttcatcaagagacagctggtggaaacccggcagatcacaaagcacgtggcacagatcctggactcccggatgaacactaagtacgacgagaatgacaagctgatccgggaagtgaaagtgatcaccctgaagtccaagctggtgtccgatttccggaaggatttccagttttacaaagtgcgcgagatcaacaactaccaccacgcccacgacgcctacctgaacgccgtcgtgggaaccgccctgatcaaaaagtaccctaagctggaaagcgagttcgtgtacggcgactacaaggtgtacgacgtgcggaagatgatcgccaagagcgagcaggaaatcggcaaggctaccgccaagtacttcttctacagcaacatcatgaactttttcaagaccgagattaccctggccaacggcgagatccggaagcggcctctgatcgagacaaacggcgaaaccggggagatcgtgtgggataagggccgggattttgccaccgtgcggaaagtgctgagcatgccccaagtgaatatcgtgaaaaagaccgaggtgcagacaggcggcttcagcaaagagtctatcctgcccaagaggaacagcgataagctgatcgccagaaagaaggactgggaccctaagaagtacggcggcttcgacagccccaccgtggcctattctgtgctggtggtggccaaagtggaaaagggcaagtccaagaaactgaagagtgtgaaagagctgctggggatcaccatcatggaaagaagcagcttcgagaagaatcccatcgactttctggaagccaagggctacaaagaagtgaaaaaggacctgatcatcaagctgcctaagtactccctgttcgagctggaaaacggccggaagagaatgctggcctctgccggcgaactgcagaagggaaacgaactggccctgccctccaaatatgtgaacttcctgtacctggccagccactatgagaagctgaagggctcccccgaggataatgagcagaaacagctgtttgtggaacagcacaagcactacctggacgagatcatcgagcagatcagcgagttctccaagagagtgatcctggccgacgctaatctggacaaagtgctgtccgcctacaacaagcaccgggataagcccatcagagagcaggccgagaatatcatccacctgtttaccctgaccaatctgggagcccctgccgccttcaagtactttgacaccaccatcgaccggaagaggtacaccagcaccaaagaggtgctggacgccaccctgatccaccagagcatcaccggcctgtacgagacacggatcgacctgtctcagctgggaggcgacagccccaagaagaagagaaaggtgggagtcgacggatccagcggctccgagaccccaggcacatctgagagcgccacccctgagtccaccggtatgaacaattcacaggggagagtgacattcgaagacgtgaccgtgaacttcacccagggagaatggcagcgcttgaacccagaacaaaggaacctctatcgggacgtgatgctggaaaactactcaaatttggtgagcgttgggcagggtgagaccactaagcctgacgtgatcctgagattggaacagggcaaggagccttggctcgaggaagaggaagtcctgggctcagggagggccgagaaaaacggtgatataggaggccagatatggaagcctaaggacgtcaaggagagcctgagcgctcccaagaagaaaaggaaggtcccaaagaaaaaaagaaaggtgtgaggatcctgagtctagaaatcaacctctggattacaaaatttgtgaaagattgactggtattcttaactatgttgctccttttacgctatgtggatacgctgctttaatgcctttgtatcatgctattgcttcccgtatggctttcattttctcctccttgtataaatcctggttgctgtctctttatgaggagttgtggcccgttgtcaggcaacgtggcgtggtgtgcactgtgtttgctgacgcaacccccactggttggggcattgccaccacctgtcagctcctttccgggactttcgctttccccctccctattgccacggcggaactcatcgccgcctgccttgcccgctgctggacaggggctcggctgttgggcactgacaattccgtggtgttgtcggggaaatcatcgtcctttccttggctgctcgcctgtgttgccacctggattctgcgcgggacgtccttctgctacgtcccttcggccctcaatccagcggaccttccttcccgcggcctgctgccggctctgcggcctcttccgcgtcttcgccttcgccctcagacgagtcggatctccctttgggccgcctccccgcctgttaattaaaaaaaaaaaaaaaaaaaaaaaaaaaaaaaaaaaaaaaaaaaaaaaaaaaaaaaaaaaaaaaaaaaaaaaaaaaaaaaaaaaaaaaaaaaaaaaaaaaaagcttgaagagcctagtggcgcctgatgcggtattttctccttacgcatctgtgcggtatttcacaccgcataatccagcacagtggcggcccgtttaaacccgctgatcagcctcgactgtgccttctagttgccagccatctgttgtttgcccctcccccgtgccttccttgaccctggaaggtgccactcccactgtcctttcctaataaaatgaggaaattgcatcgcattgtctgagtaggtgtcattctattctggggggtggggtggggcaggacagcaagggggaggattgggaagacaatagcaggcatgctggggatgcggtgggctctatggcttctgaggcggaaagaaccagctgcattaatgaatcggccaacgcgcggggagaggcggtttgcgtattgggcgctcttccgcttcctcgctcactgactcgctgcgctcggtcgttcggctgcggcgagcggtatcagctcactcaaaggcggtaatacggttatccacagaatcaggggataacgcaggaaagaacatgtgagcaaaaggccagcaaaaggccaggaaccgtaaaaaggccgcgttgctggcgtttttccataggctccgcccccctgacgagcatcacaaaaatcgacgctcaagtcagaggtggcgaaacccgacaggactataaagataccaggcgtttccccctggaagctccctcgtgcgctctcctgttccgaccctgccgcttaccggatacctgtccgcctttctcccttcgggaagcgtggcgctttctcatagctcacgctgtaggtatctcagttcggtgtaggtcgttcgctccaagctgggctgtgtgcacgaaccccccgttcagcccgaccgctgcgccttatccggtaactatcgtcttgagtccaacccggtaagacacgacttatcgccactggcagcagccactggtaacaggattagcagagcgaggtatgtaggcggtgctacagagttcttgaagtggtggcctaactacggctacactagaagaacagtatttggtatctgcgctctgctgaagccagttaccttcggaaaaagagttggtagctcttgatccggcaaacaaaccaccgctggtagcggtggtttttttgtttgcaagcagcagattacgcgcagaaaaaaaggatctcaagaagatcctttgatcttttctacggggtctgacgctcagtggaacgaaaactcacgttaagggattttggtcatgagattatcaaaaaggatcttcacctagatccttttaaattaaaaatgaagttttaaatcaatctaaagtatatatgagtaaacttggtctgacagttagaaaaactcatcgagcatcaaatgaaactgcaatttattcatatcaggattatcaataccatatttttgaaaaagccgtttctgtaatgaaggagaaaactcaccgaggcagttccataggatggcaagatcctggtatcggtctgcgattccgactcgtccaacatcaatacaacctattaatttcccctcgtcaaaaataaggttatcaagtgagaaatcaccatgagtgacgactgaatccggtgagaatggcaaaagtttatgcatttctttccagacttgttcaacaggccagccattacgctcgtcatcaaaatcactcgcatcaaccaaaccgttattcattcgtgattgcgcctgagcgaaacgaaatacgcgatcgctgttaaaaggacaattacaaacaggaatcgaatgcaaccggcgcaggaacactgccagcgcatcaacaatattttcacctgaatcaggatattcttctaatacctggaatgctgttttcccagggatcgcagtggtgagtaaccatgcatcatcaggagtacggataaaatgcttgatggtcggaagaggcataaattccgtcagccagtttagtctgaccatctcatctgtaacatcattggcaacgctacctttgccatgtttcagaaacaactctggcgcatcgggcttcccatacaatcgatagattgtcgcacctgattgcccgacattatcgcgagcccatttatacccatataaatcagcatccatgttggaatttaatcgcggcctagagcaagacgtttcccgttgaatatggctcatactcttcctttttcaatattattgaagcatttatcagggttattgtctcatgagcggatacatatttgaatgtatttagaaaaataaacaaataggggttccgcgcacatttccccgaaaagtgccacctgacgtcgatcgacggatcgggagatctcccgatcccctatggtgcactctcagtacaatctgctctgatgccgcatagttaagccagtatctgctccctgcttgtgtgttggaggtcgctgagtagtgcgcgagcaaaatttaagctacaacaaggcaaggcttgaccgacaattgcatgaagaatctgcttagggttaggcgttttgcgctgcttcgcgatgtacgggccagatatacgcgttgacattgattattgactagttattaatagtaatcaattacggggtcattagttcatagcccatatatggagttccgcgttacataacttacggtaaatggcccgcctggctgaccgcccaacgacccccgcccattgacgtcaataatgacgtatgttcccatagtaacgccaatagggactttccattgacgtcaatgggtggagtatttacggtaaactgcccacttggcagtacatcaagtgtatcatatgccaagtacgccccctattgacgtcaatgacggtaaatggcccgcctggcattatgcccagtacatgaccttatgggactttcctacttggcagtacatctacgtattagtcatcgctattaccatggtgatgcggttttggcagtacatcaatgggcgtggatagcggtttgactcacggggatttccaagtctccaccccattgacgtcaatgggagtttgttttggcaccaaaatcaacgggactttccaaaatgtcgtaacaactccgccccattgacgcaaatgggcggtaggcgtgtacggtgggaggtctatataagcagagctctctggctaactagagaacccactgcttactggcttatcgaaattaatacgactcactataag

SEQ ID NO: 494 - DNA, 6981 bp, synthetic construct
  source 1..6981: mol_type = other DNA
atgccaaaaaagaagagaaaggtaccgaagaaaaaaagaaaggtatacaatcacgatcaggagttcgacccccctaaggtgtacccaccagtgcctgcagagaagaggaagccaatccgggtgctgagcctgtttgatggcatcgccaccggcctgctggtgctgaaggatctgggcatccaggtggaccggtacatcgcctccgaggtgtgcgaggattctatcaccgtgggcatggtgcgccaccagggcaagatcatgtatgtgggcgacgtgcggtccgtgacacagaagcacatccaggagtggggcccattcgatctggtgatcggcggcagcccctgtaatgacctgtccatcgtgaaccctgcaaggaagggactgtacgagggaaccggccggctgttctttgagttttatagactgctgcacgacgccaggcctaaggagggcgacgatagaccattcttttggctgttcgagaatgtggtggctatgggcgtgagcgataagagggacatctccaggtttctggagtctaaccccgtgatgatcgatgcaaaggaggtgtccgccgcacacagagccaggtatttctggggcaatctgccaggaatgaacaggccactggcaagcaccgtgaatgacaagctggagctgcaggagtgcctggagcacggaaggatcgccaagttttccaaggtgcgcacaatcaccacacggagcaattccatcaagcagggcaaggatcagcacttccccgtgttcatgaacgagaaggaggacatcctgtggtgtaccgagatggagagagtgttcggctttccagtgcactacacagacgtgtctaacatgagcaggctggcaaggcagcggctgctgggcagatcttggagcgtgcccgtgatcaggcacctgttcgcccctctgaaggagtattttgcctgcgtgagcagcggcaactccaatgccaacagccggggcccctctttcagctccggattggtgcctctgagcctgaggggctcccacatggcagcaatccccgccctggaccccgaggccgagcctagcatggacgtgatcctggtgggctctagcgagctgtcctctagcgtgtctccaggaaccggaagggatctgatcgcatacgaggtgaaggccaatcagcggaacatcgaggacatctgtatctgctgtggcagcctgcaggtgcacacacagcacccactgttcgagggaggaatctgcgcaccctgtaaggataagttcctggacgccctgtttctgtacgacgatgacggctaccagtcctattgctctatctgctgttccggcgagaccctgctgatctgcggcaatccagattgtacaaggtgctattgttttgagtgcgtggactctctggtgggaccaggcaccagcggaaaggtgcacgccatgtccaactgggtgtgctacctgtgcctgccatcctctcgcagcggactgctgcagcggagaaggaagtggagatcccagctgaaggccttctatgatagggagtctgagaaccccctggagatgtttgagaccgtgccagtgtggcgccggcagcccgtgagggtgctgagcctgttcgaggatatcaagaaggagctgacatccctgggctttctggagtccggctctgaccccggacagctgaagcacgtggtggatgtgaccgacacagtgcggaaggatgtggaggagtggggccctttcgacctggtgtacggagcaacccctccactgggacacacatgcgacagacccccttcttggtacctgttccagtttcaccgcctgctgcagtatgcaaggccaaagccaggcagccctagaccattcttttggatgttcgtggataatctggtgctgaacaaggaggatctggacgtggccagcaggtttctggagatggagccagtgaccatcccagacgtgcacggcggctccctgcagaatgccgtgcgcgtgtggtctaacatccctgccatcagaagcaggcactgggcactggtgagcgaggaggagctgtccctgctggcccagaataagcagagcagcaagctggccgccaagtggcctacaaagctggtgaagaactgcttcctgccactgcgggagtacttcaagtatttttccaccgagctgacatctagcctgggaggaccctcctctggcgccccaccacctagcggcggctcccctgccggctctccaaccagcacagaggagggcaccagcgagtccgccacaccagagtctggacctggcaccagcacagagccatccgagggctctgccccaggctctcctgcaggcagccctacctccaccgaagagggcaccagcacagagccttctgagggcagcgccccaggcacctctacagagccaagcgagctcgaggacaagaagtacagcatcggcctggccatcggcaccaactctgtgggctgggccgtgatcaccgacgagtacaaggtgcccagcaagaaattcaaggtgctgggcaacaccgaccggcacagcatcaagaagaacctgatcggagccctgctgttcgacagcggcgaaacagccgaggccacccggctgaagagaaccgccagaagaagatacaccagacggaagaaccggatctgctatctgcaagagatcttcagcaacgagatggccaaggtggacgacagcttcttccacagactggaagagtccttcctggtggaagaggataagaagcacgagcggcaccccatcttcggcaacatcgtggacgaggtggcctaccacgagaagtaccccaccatctaccacctgagaaagaaactggtggacagcaccgacaaggccgacctgcggctgatctatctggccctggcccacatgatcaagttccggggccacttcctgatcgagggcgacctgaaccccgacaacagcgacgtggacaagctgttcatccagctggtgcagacctacaaccagctgttcgaggaaaaccccatcaacgccagcggcgtggacgccaaggccatcctgtctgccagactgagcaagagcagacggctggaaaatctgatcgcccagctgcccggcgagaagaagaatggcctgttcggcaacctgattgccctgagcctgggcctgacccccaacttcaagagcaacttcgacctggccgaggatgccaaactgcagctgagcaaggacacctacgacgacgacctggacaacctgctggcccagatcggcgaccagtacgccgacctgtttctggccgccaagaacctgtccgacgccatcctgctgagcgacatcctgagagtgaacaccgagatcaccaaggcccccctgagcgcctctatgatcaagagatacgacgagcaccaccaggacctgaccctgctgaaagctctcgtgcggcagcagctgcctgagaagtacaaagagattttcttcgaccagagcaagaacggctacgccggctacattgacggcggagccagccaggaagagttctacaagttcatcaagcccatcctggaaaagatggacggcaccgaggaactgctcgtgaagctgaacagagaggacctgctgcggaagcagcggaccttcgacaacggcagcatcccccaccagatccacctgggagagctgcacgccattctgcggcggcaggaagatttttacccattcctgaaggacaaccgggaaaagatcgagaagatcctgaccttccgcatcccctactacgtgggccctctggccaggggaaacagcagattcgcctggatgaccagaaagagcgaggaaaccatcaccccctggaacttcgaggaagtggtggacaagggcgcttccgcccagagcttcatcgagcggatgaccaacttcgataagaacctgcccaacgagaaggtgctgcccaagcacagcctgctgtacgagtacttcaccgtgtataacgagctgaccaaagtgaaatacgtgaccgagggaatgagaaagcccgccttcctgagcggcgagcagaaaaaggccatcgtggacctgctgttcaagaccaaccggaaagtgaccgtgaagcagctgaaagaggactacttcaagaaaatcgagtgcttcgactccgtggaaatctccggcgtggaagatcggttcaacgcctccctgggcacataccacgatctgctgaaaattatcaaggacaaggacttcctggacaatgaggaaaacgaggacattctggaagatatcgtgctgaccctgacactgtttgaggacagagagatgatcgaggaacggctgaaaacctatgcccacctgttcgacgacaaagtgatgaagcagctgaagcggcggagatacaccggctggggcaggctgagccggaagctgatcaacggcatccgggacaagcagtccggcaagacaatcctggatttcctgaagtccgacggcttcgccaacagaaacttcatgcagctgatccacgacgacagcctgacctttaaagaggacatccagaaagcccaggtgtccggccagggcgatagcctgcacgagcacattgccaatctggccggcagccccgccattaagaagggcatcctgcagacagtgaaggtggtggacgagctcgtgaaagtgatgggccggcacaagcccgagaacatcgtgatcgaaatggccagagagaaccagaccacccagaagggacagaagaacagccgcgagagaatgaagcggatcgaagagggcatcaaagagctgggcagccagatcctgaaagaacaccccgtggaaaacacccagctgcagaacgagaagctgtacctgtactacctgcagaatgggcgggatatgtacgtggaccaggaactggacatcaaccggctgtccgactacgatgtggacgccatcgtgcctcagagctttctgaaggacgactccatcgacaacaaggtgctgaccagaagcgacaagaaccggggcaagagcgacaacgtgccctccgaagaggtcgtgaagaagatgaagaactactggcggcagctgctgaacgccaagctgattacccagagaaagttcgacaatctgaccaaggccgagagaggcggcctgagcgaactggataaggccggcttcatcaagagacagctggtggaaacccggcagatcacaaagcacgtggcacagatcctggactcccggatgaacactaagtacgacgagaatgacaagctgatccgggaagtgaaagtgatcaccctgaagtccaagctggtgtccgatttccggaaggatttccagttttacaaagtgcgcgagatcaacaactaccaccacgcccacgacgcctacctgaacgccgtcgtgggaaccgccctgatcaaaaagtaccctaagctggaaagcgagttcgtgtacggcgactacaaggtgtacgacgtgcggaagatgatcgccaagagcgagcaggaaatcggcaaggctaccgccaagtacttcttctacagcaacatcatgaactttttcaagaccgagattaccctggccaacggcgagatccggaagcggcctctgatcgagacaaacggcgaaaccggggagatcgtgtgggataagggccgggattttgccaccgtgcggaaagtgctgagcatgccccaagtgaatatcgtgaaaaagaccgaggtgcagacaggcggcttcagcaaagagtctatcctgcccaagaggaacagcgataagctgatcgccagaaagaaggactgggaccctaagaagtacggcggcttcgacagccccaccgtggcctattctgtgctggtggtggccaaagtggaaaagggcaagtccaagaaactgaagagtgtgaaagagctgctggggatcaccatcatggaaagaagcagcttcgagaagaatcccatcgactttctggaagccaagggctacaaagaagtgaaaaaggacctgatcatcaagctgcctaagtactccctgttcgagctggaaaacggccggaagagaatgctggcctctgccggcgaactgcagaagggaaacgaactggccctgccctccaaatatgtgaacttcctgtacctggccagccactatgagaagctgaagggctcccccgaggataatgagcagaaacagctgtttgtggaacagcacaagcactacctggacgagatcatcgagcagatcagcgagttctccaagagagtgatcctggccgacgctaatctggacaaagtgctgtccgcctacaacaagcaccgggataagcccatcagagagcaggccgagaatatcatccacctgtttaccctgaccaatctgggagcccctgccgccttcaagtactttgacaccaccatcgaccggaagaggtacaccagcaccaaagaggtgctggacgccaccctgatccaccagagcatcaccggcctgtacgagacacggatcgacctgtctcagctgggaggcgacagccccaagaagaagagaaaggtgggagtcgacggatccagcggctccgagaccccaggcacatctgagagcgccacccctgagtccaccggtatgaacaattcacaggggagagtgacattcgaagacgtgaccgtgaacttcacccagggagaatggcagcgcttgaacccagaacaaaggaacctctatcgggacgtgatgctggaaaactactcaaatttggtgagcgttgggcagggtgagaccactaagcctgacgtgatcctgagattggaacagggcaaggagccttggctcgaggaagaggaagtcctgggctcagggagggccgagaaaaacggtgatataggaggccagatatggaagcctaaggacgtcaaggagagcctgagcgctcccaagaagaaaaggaaggtcccaaagaaaaaaagaaaggtgtga

SEQ ID NO: 495 - protein, 100 aa, synthetic construct
MNNSQGRVTFEDVTVNFTQGEWQRLNPEQRNLYRDVMLENYSNLVSVGQGETTKPDVILRLEQGKEPWLEEEEVLGSGRAEKNGDIGGQIWKPKDVKESL

SEQ ID NO: 496 - protein, 106 aa, synthetic construct
MAATLLMAGSQAPVTFEDMAMYLTREEWRPLDAAQRDLYRDVMQENYGNVVSLDFEIRSENEVNPKQEISEDVQFGTTSERPAENAEENPESEEGFESGDRSERQW

SEQ ID NO: 497 - protein, 95 aa, synthetic construct
MLENYRNLVFLGIAVSKPDLITCLEQGKEPCNMKRHEMVAKPPVMCSHIAEDLCPERDIKYFFQKVILRRYDKCEHENLQLRKGCKSVDECKVCK

SEQ ID NO: 498 - protein, 95 aa, synthetic construct
MGLLTFRDVAIEFSLEEWQCLDTAQRNLYKNVILENYRNLVFLGIAVSKQDLITCLEQEKEPLTVKRHEMVNEPPVMCSHFAQEFWPEQNIKDSF

SEQ ID NO: 499 - protein, 116 aa, synthetic construct
MLQMQNSEHHGQSIKTQTDSISLEDVAVNFTLEEWALLDPGQRNIYRDVMRATFKNLACIGEKWKDQDIEDEHKNQGRNLRSPMVEALCENKEDCPCGKSTSQIPDLNTNLETPTG

SEQ ID NO: 500 - protein, 100 aa, synthetic construct
MALSQGLLTFRDVAIEFSQEEWKCLDPAQRTLYRDVMLENYRNLVSLDISSKCMMNTLSSTGQGNTEVIHTGTLQRQASYHIGAFCSQEIEKDIHDFVFQ

SEQ ID NO: 501 - protein, 98 aa, synthetic construct
MAQGLVTFADVAIDFSQEEWACLNSAQRDLYWDVMLENYSNLVSLDLESAYENKSLPTKKNIHEIRASKRNSDRRSKSLGRNWICEGTLERPQRSRGR

SEQ ID NO: 502 - protein, 118 aa, synthetic construct
MLREEATKKSKEKEPGMALPQGRLTFRDVAIEFSLEEWKCLNPAQRALYRAVMLENYRNLEFVDSSLKSMMEFSSTRHSITGEVIHTGTLQRHKSHHIGDFCFPEMKKDIHHFEFQWQ

SEQ ID NO: 503 - protein, 104 aa, synthetic construct
MPGPPGSLEMGPLTFRDVAIEFSLEEWQCLDTAQRNLYRKVMFENYRNLVFLGIAVSKPHLITCLEQGKEPWNRKRQEMVAKPPVIYSHFTEDLWPEHSIKDSF

SEQ ID NO: 504 - protein, 113 aa, synthetic construct
MSPPWSPALAAEGRGSSCEASVSFEDVTVDFSKEEWQHLDPAQRRLYWDVTLENYSHLLSVGYQIPKSEAAFKLEQGEGPWMLEGEAPHQSCSGEAIGKMQQQGIPGGIFFHC

SEQ ID NO: 505 - protein, 109 aa, synthetic construct
MASPSPPPESKEEWDYLDPAQRSLYKDVMMENYGNLVSLDVLNRDKDEEPTVKQEIEEIEEEVEPQGVIVTRIKSEIDQDPMGRETFELVGRLDKQRGIFLWEIPRESL

SEQ ID NO: 506 - protein, 99 aa, synthetic construct
MALTQGPLKFMDVAIEFSQEEWKCLDPAQRTLYRDVMLENYRNLVSLGICLPDLSVTSMLEQKRDPWTLQSEEKIANDPDGRECIKGVNTERSSKLGSN

SEQ ID NO: 507 - protein, 100 aa, synthetic construct
MAASAQVSVTFEDVAVTFTQEEWGQLDAAQRTLYQEVMLETCGLLMSLGCPLFKPELIYQLDHRQELWMATKDLSQSSYPGDNTKPKTTEPTFSHLALPE

SEQ ID NO: 508 - protein, 144 aa, synthetic construct
MFSQEERMAAGYLPRWSQELVTFEDVSMDFSQEEWELLEPAQKNLYREVMLENYRNVVSLEALKNQCTDVGIKEGPLSPAQTSQVTSLSSWTGYLLFQPVASSHLEQREALWIEEKGTPQASCSDWMTVLRNQDSTYKKVALQE

SEQ ID NO: 509 - protein, 97 aa, synthetic construct
MSQGSVTFRDVAIDFSQEEWKWLQPAQRDLYRCVMLENYGHLVSLGLSISKPDVVSLLEQGKEPWLGKREVKRDLFSVSESSGEIKDFSPKNVIYDD

SEQ ID NO: 510 - protein, 112 aa, synthetic construct
MEEAQKRKAKESGMALPQGRLTFMDVAIEFSQEEWKSLDPGQRALYRDVMLENYRNLVFLGRSCVLGSNAENKPIKNQLGLTLESHLSELQLFQAGRKIYRSNQVEKFTNHR

SEQ ID NO: 511 - protein, 105 aa, synthetic construct
MAAAVLTDRAQVSVTFDDVAVTFTKEEWGQLDLAQRTLYQEVMLENCGLLVSLGCPVPKAELICHLEHGQEPWTRKEDLSQDTCPGDKGKPKTTEPTTCEPALSE

SEQ ID NO: 512 - protein, 99 aa, synthetic construct
MIQAQESITLEDVAVDFTWEEWQLLGAAQKDLYRDVMLENYSNLVAVGYQASKPDALFKLEQGEQLWTIEDGIHSGACSDIWKVDHVLERLQSESLVNR

SEQ ID NO: 513 - protein, 112 aa, synthetic construct
MEGVAGVMSVGPPAARLQEPVTFRDVAVDFTQEEWGQLDPTQRILYRDVMLETFGHLLSIGPELPKPEVISQLEQGTELWVAERGTTQGCHPAWEPRSESQASRKEEGLPEE

SEQ ID NO: 514 - protein, 97 aa, synthetic construct
MSLGSELFRDVAIVFSQEEWQWLAPAQRDLYRDVMLETYSNLVSLGLAVSKPDVISFLEQGKEPWMVERVVSGGLCPVLESRYDTKELFPKQHVYEV

SEQ ID NO: 515 - protein, 105 aa, synthetic construct
MAHKYVGLQYHGSVTFEDVAIAFSQQEWESLDSSQRGLYRDVMLENYRNLVSMAGHSRSKPHVIALLEQWKEPEVTVRKDGRRWCTDLQLEDDTIGCKEMPTSEN

SEQ ID NO: 516 - protein, 92 aa, synthetic construct
MAFEDVAVYFSQEEWGLLDTAQRALYRRVMLDNFALVASLGLSTSRPRVVIQLERGEEPWVPSGTDTTLSRTTYRRRNPGSWSLTEDRDVSG

SEQ ID NO: 517 - protein, 104 aa, synthetic construct
MLENYRNLVFVGIAASKPDLITCLEQGKEPWNVKRHEMVTEPPVVYSYFAQDLWPKQGKKNYFQKVILRTYKKCGRENLQLRKYCKSMDECKVHKECYNGLNQC

SEQ ID NO: 518 - protein, 127 aa, synthetic construct
MHFRRPDPCREPLASPIQDSVAFEDVAVNFTQEEWALLDSSQKNLYREVMQETCRNLASVGSQWKDQNIEDHFEKPGKDIRNHIVQRLCESKEDGQYGEVVSQIPNLDLNENISTGLKPCECSICGK

SEQ ID NO: 519 - protein, 110 aa, synthetic construct
MALSQGLFTFKDVAIEFSQEEWECLDPAQRALYRDVMLENYRNLLSLDEDNIPPEDDISVGFTSKGLSPKENNKEELYHLVILERKESHGINNFDLKEVWENMPKFDSLW

SEQ ID NO: 520 - protein, 98 aa, synthetic construct
MTFEDIIVDFTQEEWALLDTSQRKLFQDVMLENISHLVSIGKQLCKSVVLSQLEQVEKLSTQRISLLQGREVGIKHQEIPFIHHIYQKGTSTISTMRS

SEQ ID NO: 521 - protein, 103 aa, synthetic construct
MAVTFEDVTIIFTWEEWKFLDSSQKRLYREVMWENYTNVMSVENWNESYKSQEEKFRYLEYENFSYWQGWWNAGAQMYENQNYGETVQGTDSKDLTQQDRSQC

SEQ ID NO: 522 - protein, 99 aa, synthetic construct
MITSQGSVSFRDVTVGFTQEEWQHLDPAQRTLYRDVMLENYSHLVSVGYCIPKPEVILKLEKGEEPWILEEKFPSQSHLELINTSRNYSIMKFNEFNKG

SEQ ID NO: 523 - protein, 114 aa, synthetic construct
MFEDVAVYLSREEWGRLGPAQRGLYRDVMLETYGNLVSLGVGPAGPKPGVISQLERGDEPWVLDVQGTSGKEHLRVNSPALGTRTEYKELTSQETFGEEDPQGSEPVEACDHIS

SEQ ID NO: 524 - protein, 112 aa, synthetic construct
METYGNVVSLGLPGSKPDIISQLERGEDPWVLDRKGAKKSQGLWSDYSDNLKYDHTTACTQQDSLSCPWECETKGESQNTDLSPKPLISEQTVILGKTPLGRIDQENNETKQ

SEQ ID NO: 525 - protein, 102 aa, synthetic construct
MAEMNPAQGHVVFEDVAIYFSQEEWGHLDEAQRLLYRDVMLENLALLSSLGCCHGAEDEEAPLEPGVSVGVSQVMAPKPCLSTQNTQPCETCSSLLKDILRL

SEQ ID NO: 526 - protein, 62 aa, synthetic construct
MLDNYRNLVFLGIAVSKPDLITCLEQGKEPCNMKRHAMVAKPPVVCSHFAQDLWPKQGLKDS

SEQ ID NO: 527 - protein, 105 aa, synthetic construct
MAAGQREARPQVSLTFEDVAVLFTRDEWRKLAPSQRNLYRDVMLENYRNLVSLGLPFTKPKVISLLQQGEDPWEVEKDGSGVSSLGSKSSHKTTKSTQTQDSSFQ

SEQ ID NO: 528 - protein, 97 aa, synthetic construct
MALRSVMFSDVSIDFSPEEWEYLDLEQKDLYRDVMLENYSNLVSLGCFISKPDVISSLEQGKEPWKVVRKGRRQYPDLETKYETKKLSLENDIYEIN

SEQ ID NO: 529 - protein, 98 aa, synthetic construct
MTTFKEAMTFKDVAVVFTEEELGLLDLAQRKLYRDVMLENFRNLLSVGHQAFHRDTFHFLREEKIWMMKTAIQREGNSGDKIQTEMETVSEAGTHQEW

SEQ ID NO: 530 - protein, 103 aa, synthetic construct
MFQVEQKSQESVSFKDVTVGFTQEEWQHLDPSQRALYRDVMLENYSNLVSVGYCVHKPEVIFRLQQGEEPWKQEEEFPSQSFPEVWTADHLKERSQENQSKHL

SEQ ID NO: 531 - protein, 98 aa, synthetic construct
MTKSKEAVTFKDVAVVFSEEELQLLDLAQRKLYRDVMLENFRNVVSVGHQSTPDGLPQLEREEKLWMMKMATQRDNSSGAKNLKEMETLQEVGLRYLP

SEQ ID NO: 532 - protein, 112 aa, synthetic construct
MSQKPQVLGPEKQDGSCEASVSFEDVTVDFSREEWQQLDPAQRCLYRDVMLELYSHLFAVGYHIPNPEVIFRMLKEKEPRVEEAEVSHQRCQEREFGLEIPQKEISKKASFQ

SEQ ID NO: 533 - protein, 95 aa, synthetic construct
MELVTFRDVAIEFSPEEWKCLDPAQQNLYRDVMLENYRNLVSLGFVISNPDLVTCLEQIKEPCNLKIHETAAKPPAICSPFSQDLSPVQGIEDSF

SEQ ID NO: 534 - protein, 112 aa, synthetic construct
MSTLLQGGHNLLSSASFQESVTFKDVIVDFTQEEWKQLDPGQRDLFRDVTLENYTHLVSIGLQVSKPDVISQLEQGTEPWIMEPSIPVGTCADWETRLENSVSAPEPDISEE

SEQ ID NO: 535 - protein, 112 aa, synthetic construct
MDPAQVPVAADLLTDHEEGYVTFEDVAVYFSQEEWRLLDDAQRLLYRNVMLENFTLLASLGLASSKTHEITQLESWEEPFMPAWEVVTSAIPRGCWHGAEAEEAPEQIASVG

SEQ ID NO: 536 - protein, 112 aa, synthetic construct
MKKLEAVGTGIEPKAMSQGLVTFGDVAVDFSQEEWEWLNPIQRNLYRKVMLENYRNLASLGLCVSKPDVISSLEQGKEPWTVKRKMTRAWCPDLKAVWKIKELPLKKDFCEG

SEQ ID NO: 537 - protein, 108 aa, synthetic construct
MSLLGEHWDYDALFETQPGLVTIKNLAVDFRQQLHPAQKNFCKNGIWENNSDLGSAGHCVAKPDLVSLLEQEKEPWMVKRELTGSLFSGQRSVHETQELFPKQDSYAE

SEQ ID NO: 538 - protein, 113 aa, synthetic construct
MLALAASQPARLEERLIRDRDLGASLLPAAPQEQWRQLDSTQKEQYWDLILETYGKMVSGAGISHPKSDLTNSIEFGEELAGIYLHVNEKIPRPTCIGDRQENDKENLNLENH

SEQ ID NO: 539 - protein, 131 aa, synthetic construct
MEGRPGETTDTCFVSGVHGPVALGDIPFYFSREEWGTLDPAQRDLFWDIKRENSRNTTLGFGLKGQSEKSLLQEMVPVVPGQTGSDVTVSWSPEEAEAWESENRPRAALGPVVGARRGRPPTRRRQFRDLA

SEQ ID NO: 540 - protein, 116 aa, synthetic construct
MVAVVRALQRALDGTSSQGMVTFEDTAVSLTWEEWERLDPARRDFCRESAQKDSGSTVPPSLESRVENKELIPMQQILEEAEPQGQLQEAFQGKRPLFSKCGSTHEDRVEKQSGDP

SEQ ID NO: 541 - protein, 113 aa, synthetic construct
MNKSQGSVSFTDVTVDFTQEEWEQLDPSQRILYMDVMLENYSNLLSVEVWKADDQMERDHRNPDEQARQFLILKNQTPIEERGDLFGKALNLNTDFVSLRQVPYKYDLYEKTL

SEQ ID NO: 542 - protein, 108 aa, synthetic construct
MAHGSVTFRDVAIDFSQEEWEFLDPAQRDLYRDVMWENYSNFISLGPSISKPDVITLLDEERKEPGMVVREGTRRYCPDLESRYRTNTLSPEKDIYEIYSFQWDIMER

SEQ ID NO: 543 - protein, 141 aa, synthetic construct
MAAAVLRDSTSVPVTAEAKLMGFTQGCVTFEDVAIYFSQEEWGLLDEAQRLLYRDVMLENFALITALVCWHGMEDEETPEQSVSVEGVPQVRTPEASPSTQKIQSCDMCVPFLTDILHLTDLPGQELYLTGACAVFHQDQK

SEQ ID NO: 544 - protein, 133 aa, synthetic construct
MLPPTAASQREGHTEGGELVNELLKSWLKGLVTFEDVAVEFTQEEWALLDPAQRTLYRDVMLENCRNLASLGNQVDKPRLISQLEQEDKVMTEERGILSGTCPDVENPFKAKGLTPKLHVFRKEQSRNMKMER

SEQ ID NO: 545 - protein, 107 aa, synthetic construct
MAQESVMFSDVSVDFSQEEWECLNDDQRDLYRDVMLENYSNLVSMGHSISKPNVISYLEQGKEPWLADRELTRGQWPVLESRCETKKLFLKKEIYEIESTQWEIMEK

SEQ ID NO: 546 - protein, 114 aa, synthetic construct
MPGAPGSLEMGPLTFRDVTIEFSLEEWQCLDTVQQNLYRDVMLENYRNLVFLGMAVFKPDLITCLKQGKEPWNMKRHEMVTKPPVMRSHFTQDLWPDQSTKDSFQEVILRTYAR

SEQ ID NO: 547 - protein, 95 aa, synthetic construct
MAGSQFPDFKHLGTFLVFEELVTFEDVLVDFSPEELSSLSAAQRNLYREVMLENYRNLVSLGHQFSKPDIISRLEEEESYAMETDSRHTVICQGE

SEQ ID NO: 548 - protein, 78 aa, synthetic construct
MPGPPRSLEMGLLTFRDVAIEFSLEEWQHLDIAQQNLYRNVMLENYRNLAFLGIAVSKPDLITCLEQGKEPWNMKRHE

SEQ ID NO: 549 - protein, 93 aa, synthetic construct
MAPPLAPLPPRDPNGAGPEWREPGAVSFADVAVYFCREEWGCLRPAQRALYRDVMRETYGHLSALGIGGNKPALISWVEEEAELWGPAAQDPE

SEQ ID NO: 550 - protein, 100 aa, synthetic construct
MGPPLAPRPAHVPGEAGPRRTRESRPGAVSFADVAVYFSPEEWECLRPAQRALYRDVMRETFGHLGALGFSVPKPAFISWVEGEVEAWSPEAQDPDGESS

SEQ ID NO: 551 - protein, 573 aa, synthetic construct
MDAKSLTAWSRTLVTFKDVFVDFTREEWKLLDTAQQIVYRNVMLENYKNLVSLGYQLTKPDVILRLEKGEEPWLVEREIHQETHPDSETAFEIKSSVSSRSIFKDKQSCDIKMEGMARNDLWYLSLEEVWKCRDQLDKYQENPERHLRQVAFTQKKVLTQERVSESGKYGGNCLLPAQLVLREYFHKRDSHTKSLKHDLVLNGHQDSCASNSNECGQTFCQNIHLIQFARTHTGDKSYKCPDNDNSLTHGSSLGISKGIHREKPYECKECGKFFSWRSNLTRHQLIHTGEKPYECKECGKSFSRSSHLIGHQKTHTGEEPYECKECGKSFSWFSHLVTHQRTHTGDKLYTCNQCGKSFVHSSRLIRHQRTHTGEKPYECPECGKSFRQSTHLILHQRTHVRVRPYECNECGKSYSQRSHLVVHHRIHTGLKPFECKDCGKCFSRSSHLYSHQRTHTGEKPYECHDCGKSFSQSSALIVHQRIHTGEKPYECCQCGKAFIRKNDLIKHQRIHVGEETYKCNQCGIIFSQNSPFIVHQIAHTGEQFLTCNQCGTALVNTSNLIGYQTNHIRENAY

SEQ ID NO: 552 - protein, 191 aa, synthetic construct
MGKKTKRTADSSSSEDEEEYVVEKVLDRRVVKGQVEYLLKWKGFSEEHNTWEPEKNLDCPELISEFMKKYKKMKEGENNKPREKSESNKRKSNFSNSADDIKSKKKREQSNDIARGFERGLEPEKIIGATDSCGDLMFLMKWKDTDEADLVLAKEANVKCPQIVIAFYEERLTWHAYPEDAENKEKETAKS

SEQ ID NO: 553 - protein, 228 aa, synthetic construct
MTMGDKKSPTRPKRQAKPAADEGFWDCSVCTFRNSAEAFKCSICDVRKGTSTRKPRINSQLVAQQVAQQYATPPPPKKEKKEKVEKQDKEKPEKDKEISPSVTKKNTNKKTKPKSDILKDPPSEANSIQSANATTKTSETNHTSRPRLKNVDRSTAQQLAVTVGNVTVIITDFKEKTRSSSTSSSTVTSSAGSEQQNQSSSGSESTDKGSSRSSTPKGDMSAVNDESF

SEQ ID NO: 554 - protein, 180 aa, synthetic construct
MGDKKSPTRPKRQPKPSSDEGYWDCSVCTFRNSAEAFKCMMCDVRKGTSTRKPRPVSQLVAQQVTQQFVPPTQSKKEKKDKVEKEKSEKETTSKKNSHKKTRPRLKNVDRSSAQHLEVTVGDLTVIITDFKEKTKSPPASSAASADQHSQSGSSSDNTERGMSRSSSPRGEASSLNGESH

SEQ ID NO: 555 - protein, 3065 aa, synthetic construct
MEEKQQIILANQDGGTVAGAAPTFFVILKQPGNGKTDQGILVTNQDACALASSVSSPVKSKGKICLPADCTVGGITVTLDNNSMWNEFYHRSTEMILTKQGRRMFPYCRYWITGLDSNLKYILVMDISPVDNHRYKWNGRWWEPSGKAEPHVLGRVFIHPESPSTGHYWMHQPVSFYKLKLTNNTLDQEGHIILHSMHRYLPRLHLVPAEKAVEVIQLNGPGVHTFTFPQTEFFAVTAYQNIQITQLKIDYNPFAKGFRDDGLNNKPQRDGKQKNSSDQEGNNISSSSGHRVRLTEGQGSEIQPGDLDPLSRGHETSGKGLEKTSLNIKRDFLGFMDTDSALSEVPQLKQEISECLIASSFEDDSRVASPLDQNGSFNVVIKEEPLDDYDYELGECPEGVTVKQEETDEETDVYSNSDDDPILEKQLKRHNKVDNPEADHLSSKWLPSSPSGVAKAKMFKLDTGKMPVVYLEPCAVTRSTVKISELPDNMLSTSRKDKSSMLAELEYLPTYIENSNETAFCLGKESENGLRKHSPDLRVVQKYPLLKEPQWKYPDISDSISTERILDDSKDSVGDSLSGKEDLGRKRTTMLKIATAAKVVNANQNASPNVPGKRGRPRKLKLCKAGRPPKNTGKSLISTKNTPVSPGSTFPDVKPDLEDVDGVLFVSFESKEALDIHAVDGTTEESSSLQASTTNDSGYRARISQLEKELIEDLKTLRHKQVIHPGLQEVGLKLNSVDPTMSIDLKYLGVQLPLAPATSFPFWNLTGTNPASPDAGFPFVSRTGKTNDFTKIKGWRGKFHSASASRNEGGNSESSLKNRSAFCSDKLDEYLENEGKLMETSMGFSSNAPTSPVVYQLPTKSTSYVRTLDSVLKKQSTISPSTSYSLKPHSVPPVSRKAKSQNRQATFSGRTKSSYKSILPYPVSPKQKYSHVILGDKVTKNSSGIISENQANNFVVPTLDENIFPKQISLRQAQQQQQQQQGSRPPGLSKSQVKLMDLEDCALWEGKPRTYITEERADVSLTTLLTAQASLKTKPIHTIIRKRAPPCNNDFCRLGCVCSSLALEKRQPAHCRRPDCMFGCTCLKRKVVLVKGGSKTKHFQRKAAHRDPVFYDTLGEEAREEEEGIREEEEQLKEKKKRKKLEYTICETEPEQPVRHYPLWVKVEGEVDPEPVYIPTPSVIEPMKPLLLPQPEVLSPTVKGKLLTGIKSPRSYTPKPNPVIREEDKDPVYLYFESMMTCARVRVYERKKEDQRQPSSSSSPSPSFQQQTSCHSSPENHNNAKEPDSEQQPLKQLTCDLEDDSDKLQEKSWKSSCNEGESSSTSYMHQRSPGGPTKLIEIISDCNWEEDRNKILSILSQHINSNMPQSLKVGSFIIELASQRKSRGEKNPPVYSSRVKISMPSCQDQDDMAEKSGSETPDGPLSPGKMEDISPVQTDALDSVRERLHGGKGLPFYAGLSPAGKLVAYKRKPSSSTSGLIQVASNAKVAASRKPRTLLPSTSNSKMASSSGTATNRPGKNLKAFVPAKRPIAARPSPGGVFTQFVMSKVGALQQKIPGVSTPQTLAGTQKFSIRPSPVMVVTPVVSSEPVQVCSPVTAAVTTTTPQVFLENTTAVTPMTAISDVETKETTYSSGATTTGVVEVSETNTSTSVTSTQSTATVNLTKTTGITTPVASVAFPKSLVASPSTITLPVASTASTSLVVVTAAASSSMVTTPTSSLGSVPIILSGINGSPPVSQRPENAAQIPVATPQVSPNTVKRAGPRLLLIPVQQGSPTLRPVSNTQLQGHRMVLQPVRSPSGMNLFRHPNGQIVQLLPLHQLRGSNTQPNLQPVMFRNPGSVMGIRLPAPSKPSETPPSSTSSSAFSVMNPVIQAVGSSSAVNVITQAPSLLSSGASFVSQAGTLTLRISPPEPQSFASKTGSETKITYSSGGQPVGTASLIPLQSGSFALLQLPGQKPVPSSILQHVASLQMKRESQNPDQKDETNSIKREQETKKVLQSEGEAVDPEANVIKQNSGAATSEETLNDSLEDRGDHLDEECLPEEGCATVKPSEHSCITGSHTDQDYKDVNEEYGARNRKSSKEKVAVLEVRTISEKASNKTVQNLSKVQHQKLGDVKVEQQKGFDNPEENSSEFPVTFKEESKFELSGSKVMEQQSNLQPEAKEKECGDSLEKDRERWRKHLKGPLTRKCVGASQECKKEADEQLIKETKTCQENSDVFQQEQGISDLLGKSGITEDARVLKTECDSWSRISNPSAFSIVPRRAAKSSRGNGHFQGHLLLPGEQIQPKQEKKGGRSSADFTVLDLEEDDEDDNEKTDDSIDEIVDVVSDYQSEEVDDVEKNNCVEYIEDDEEHVDIETVEELSEEINVAHLKTTAAHTQSFKQPSCTHISADEKAAERSRKAPPIPLKLKPDYWSDKLQKEAEAFAYYRRTHTANERRRRGEMRDLFEKLKITLGLLHSSKVSKSLILTRAFSEIQGLTDQADKLIGQKNLLTRKRNILIRKVSSLSGKTEEVVLKKLEYIYAKQQALEAQKRKKKMGSDEFDISPRISKQQEGSSASSVDLGQMFINNRRGKPLILSRKKDQATENTSPLNTPHTSANLVMTPQGQLLTLKGPLFSGPVVAVSPDLLESDLKPQVAGSAVALPENDDLFMMPRIVNVTSLATEGGLVDMGGSKYPHEVPDSKPSDHLKDTVRNEDNSLEDKGRISSRGNRDGRVTLGPTQVFLANKDSGYPQIVDVSNMQKAQEFLPKKISGDMRGIQYKWKESESRGERVKSKDSSFHKLKMKDLKDSSIEMELRKVTSAIEEAALDSSELLTNMEDEDDTDETLTSLLNEIAFLNQQLNDDSVGLAELPSSMDTEFPGDARRAFISKVPPGSRATFQVEHLGTGLKELPDVQGESDSISPLLLHLEDDDFSENEKQLAEPASEPDVLKIVIDSEIKDSLLSNKKAIDGGKNTSGLPAEPESVSSPPTLHMKTGLENSNSTDTLWRPMPKLAPLGLKVANPSSDADGQSLKVMPCLAPIAAKVGSVGHKMNLTGNDQEGRESKVMPTLAPVVAKLGNSGASPSSAGK

SEQ ID NO: 556 - protein, 185 aa, synthetic construct
MGKKQNKKKVEEVLEEEEEEYVVEKVLDRRVVKGKVEYLLKWKGFSDEDNTWEPEENLDCPDLIAEFLQSQKTAHETDKSEGGKRKADSDSEDKGEESKPKKKKEESEKPRGFARGLEPERIIGATDSSGELMFLMKWKNSDEADLVPAKEANVKCPQVVISFYEERLTWHSYPSEDDDKKDDKN

SEQ ID NO: 557 - protein, 660 aa, synthetic construct
MLVCYSVLACEILWDLPCSIMGSPLGHFTWDKYLKETCSVPAPVHCFKQSYTPPSNEFKISMKLEAQDPRNTTSTCIATVVGLTGARLRLRLDGSDNKNDFWRLVDSAEIQPIGNCEKNGGMLQPPLGFRLNASSWPMFLLKTLNGAEMAPIRIFHKEPPSPSHNFFKMGMKLEAVDRKNPHFICPATIGEVRGSEVLVTFDGWRGAFDYWCRFDSRDIFPVGWCSLTGDNLQPPGTKVVIPKNPYPASDVNTEKPSIHSSTKTVLEHQPGQRGRKPGKKRGRTPKTLISHPISAPSKTAEPLKFPKKRGPKPGSKRKPRTLLNPPPASPTTSTPEPDTSTVPQDAATIPSSAMQAPTVCIYLNKNGSTGPHLDKKKVQQLPDHFGPARASVVLQQAVQACIDCAYHQKTVFSFLKQGHGGEVISAVFDREQHTLNLPAVNSITYVLRFLEKLCHNLRSDNLFGNQPFTQTHLSLTAIEYSHSHDRYLPGETFVLGNSLARSLEPHSDSMDSASNPTNLVSTSQRHRPLLSSCGLPPSTASAVRRLCSRGVLKGSNERRDMESFWKLNRSPGSDRYLESRDASRLSGRDPSSWTVEDVMQFVREADPQLGPHADLFRKHEIDGKALLLLRSDMMMKYMGLKLGPALKLSYHIDRLKQGKF

SEQ ID NO: 558 - protein, 860 aa, synthetic construct
MEQVAEGARVTAVPVSAADSTEELAEVEEGVGVVGEDNDAAARGAEAFGDSEEDGEDVFEVEKILDMKTEGGKVLYKVRWKGYTSDDDTWEPEIHLEDCKEVLLEFRKKIAENKAKAVRKDIQRLSLNNDIFEANSDSDQQSETKEDTSPKKKKKKLRQREEKSPDDLKKKKAKAGKLKDKSKPDLESSLESLVFDLRTKKRISEAKEELKESKKPKKDEVKETKELKKVKKGEIRDLKTKTREDPKENRKTKKEKFVESQVESESSVLNDSPFPEDDSEGLHSDSREEKQNTKSARERAGQDMGLEHGFEKPLDSAMSAEEDTDVRGRRKKKTPRKAEDTRENRKLENKNAFLEKKTVPKKQRNQDRSKSAAELEKLMPVSAQTPKGRRLSGEERGLWSTDSAEEDKETKRNESKEKYQKRHDSDKEEKGRKEPKGLKTLKEIRNAFDLFKLTPEEKNDVSENNRKREEIPLDFKTIDDHKTKENKQSLKERRNTRDETDTWAYIAAEGDQEVLDSVCQADENSDGRQQILSLGMDLQLEWMKLEDFQKHLDGKDENFAATDAIPSNVLRDAVKNGDYITVKVALNSNEEYNLDQEDSSGMTLVMLAAAGGQDDLLRLLITKGAKVNGRQKNGTTALIHAAEKNFLTTVAILLEAGAFVNVQQSNGETALMKACKRGNSDIVRLVIECGADCNILSKHQNSALHFAKQSNNVLVYDLLKNHLETLSRVAEETIKDYFEARLALLEPVFPIACHRLCEGPDFSTDFNYKPPQNIPEGSGILLFIFHANFLGKEVIARLCGPCSVQAVVLNDKFQLPVFLDSHFVYSFSPVAGPNKLFIRLTEAPSAKVKLLIGAYRVQLQ

SEQ ID NO: 559 - protein, 103 aa, synthetic construct
MSEEKPKEGVKTENDHINLKVAGQDGSVVQFKIKRHTPLSKLMKAYCERQGLSMRQIRFRFDGQPINETDTPAQLEMEDEDTIDVFQQQTGGVPESSLAGHSF

SEQ ID NO: 560 - protein, 4834 aa, synthetic construct
MPSESFCLAAQARLDSKWLKTDIQLAFTRDGLCGLWNEMVKDGEIVYTGTESTQNGELPPRKDDSVEPSGTKKEDLNDKEKKDEEETPAPIYRAKSILDSWVWGKQPDVNELKECLSVLVKEQQALAVQSATTTLSALRLKQRLVILERYFIALNRTVFQENVKVKWKSSGISLPPVDKKSSRPAGKGVEGLARVGSRAALSFAFAFLRRAWRSGEDADLCSELLQESLDALRALPEASLFDESTVSSVWLEVVERATRFLRSVVTGDVHGTPATKGPGSIPLQDQHLALAILLELAVQRGTLSQMLSAILLLLQLWDSGAQETDNERSAQGTSAPLLPLLQRFQSIICRKDAPHSEGDMHLLSGPLSPNESFLRYLTLPQDNELAIDLRQTAVVVMAHLDRLATPCMPPLCSSPTSHKGSLQEVIGWGLIGWKYYANVIGPIQCEGLANLGVTQIACAEKRFLILSRNGRVYTQAYNSDTLAPQLVQGLASRNIVKIAAHSDGHHYLALAATGEVYSWGCGDGGRLGHGDTVPLEEPKVISAFSGKQAGKHVVHIACGSTYSAAITAEGELYTWGRGNYGRLGHGSSEDEAIPMLVAGLKGLKVIDVACGSGDAQTLAVTENGQVWSWGDGDYGKLGRGGSDGCKTPKLIEKLQDLDVVKVRCGSQFSIALTKDGQVYSWGKGDNQRLGHGTEEHVRYPKLLEGLQGKKVIDVAAGSTHCLALTEDSEVHSWGSNDQCQHFDTLRVTKPEPAALPGLDTKHIVGIACGPAQSFAWSSCSEWSIGLRVPFVVDICSMTFEQLDLLLRQVSEGMDGSADWPPPQEKECVAVATLNLLRLQLHAAISHQVDPEFLGLGLGSILLNSLKQTVVTLASSAGVLSTVQSAAQAVLQSGWSVLLPTAEERARALSALLPCAVSGNEVNISPGRRFMIDLLVGSLMADGGLESALHAAITAEIQDIEAKKEAQKEKEIDEQEANASTFHRSRTPLDKDLINTGICESSGKQCLPLVQLIQQLLRNIASQTVARLKDVARRISSCLDFEQHSRERSASLDLLLRFQRLLISKLYPGESIGQTSDISSPELMGVGSLLKKYTALLCTHIGDILPVAASIASTSWRHFAEVAYIVEGDFTGVLLPELVVSIVLLLSKNAGLMQEAGAVPLLGGLLEHLDRFNHLAPGKERDDHEELAWPGIMESFFTGQNCRNNEEVTLIRKADLENHNKDGGFWTVIDGKVYDIKDFQTQSLTGNSILAQFAGEDPVVALEAALQFEDTRESMHAFCVGQYLEPDQEIVTIPDLGSLSSPLIDTERNLGLLLGLHASYLAMSTPLSPVEIECAKWLQSSIFSGGLQTSQIHYSYNEEKDEDHCSSPGGTPASKSRLCSHRRALGDHSQAFLQAIADNNIQDHNVKDFLCQIERYCRQCHLTTPIMFPPEHPVEEVGRLLLCCLLKHEDLGHVALSLVHAGALGIEQVKHRTLPKSVVDVCRVVYQAKCSLIKTHQEQGRSYKEVCAPVIERLRFLFNELRPAVCNDLSIMSKFKLLSSLPRWRRIAQKIIRERRKKRVPKKPESTDDEEKIGNEESDLEEACILPHSPINVDKRPIAIKSPKDKWQPLLSTVTGVHKYKWLKQNVQGLYPQSPLLSTIAEFALKEEPVDVEKMRKCLLKQLERAEVRLEGIDTILKLASKNFLLPSVQYAMFCGWQRLIPEGIDIGEPLTDCLKDVDLIPPFNRMLLEVTFGKLYAWAVQNIRNVLMDASAKFKELGIQPVPLQTITNENPSGPSLGTIPQARFLLVMLSMLTLQHGANNLDLLLNSGMLALTQTALRLIGPSCDNVEEDMNASAQGASATVLEETRKETAPVQLPVSGPELAAMMKIGTRVMRGVDWKWGDQDGPPPGLGRVIGELGEDGWIRVQWDTGSTNSYRMGKEGKYDLKLAELPAAAQPSAEDSDTEDDSEAEQTERNIHPTAMMFTSTINLLQTLCLSAGVHAEIMQSEATKTLCGLLRMLVESGTTDKTSSPNRLVYREQHRSWCTLGFVRSIALTPQVCGALSSPQWITLLMKVVEGHAPFTATSLQRQILAVHLLQAVLPSWDKTERARDMKCLVEKLFDFLGSLLTTCSSDVPLLRESTLRRRRVRPQASLTATHSSTLAEEVVALLRTLHSLTQWNGLINKYINSQLRSITHSFVGRPSEGAQLEDYFPDSENPEVGGLMAVLAVIGGIDGRLRLGGQVMHDEFGEGTVTRITPKGKITVQFSDMRTCRVCPLNQLKPLPAVAFNVNNLPFTEPMLSVWAQLVNLAGSKLEKHKIKKSTKQAFAGQVDLDLLRCQQLKLYILKAGRALLSHQDKLRQILSQPAVQETGTVHTDDGAVVSPDLGDMSPEGPQPPMILLQQLLASATQPSPVKAIFDKQELEAAALAVCQCLAVESTHPSSPGFEDCSSSEATTPVAVQHIRPARVKRRKQSPVPALPIVVQLMEMGFSRRNIEFALKSLTGASGNASSLPGVEALVGWLLDHSDIQVTELSDADTVSDEYSDEEVVEDVDDAAYSMSTGAVVTESQTYKKRADFLSNDDYAVYVRENIQVGMMVRCCRAYEEVCEGDVGKVIKLDRDGLHDLNVQCDWQQKGGTYWVRYIHVELIGYPPPSSSSHIKIGDKVRVKASVTTPKYKWGSVTHQSVGVVKAFSANGKDIIVDFPQQSHWTGLLSEMELVPSIHPGVTCDGCQMFPINGSRFKCRNCDDFDFCETCFKTKKHNTRHTFGRINEPGQSAVFCGRSGKQLKRCHSSQPGMLLDSWSRMVKSLNVSSSVNQASRLIDGSEPCWQSSGSQGKHWIRLEIFPDVLVHRLKMIVDPADSSYMPSLVVVSGGNSLNNLIELKTININPSDTTVPLLNDCTEYHRYIEIAIKQCRSSGIDCKIHGLILLGRIRAEEEDLAAVPFLASDNEEEEDEKGNSGSLIRKKAAGLESAATIRTKVFVWGLNDKDQLGGLKGSKIKVPSFSETLSALNVVQVAGGSKSLFAVTVEGKVYACGEATNGRLGLGISSGTVPIPRQITALSSYVVKKVAVHSGGRHATALTVDGKVFSWGEGDDGKLGHFSRMNCDKPRLIEALKTKRIRDIACGSSHSAALTSSGELYTWGLGEYGRLGHGDNTTQLKPKMVKVLLGHRVIQVACGSRDAQTLALTDEGLVFSWGDGDFGKLGRGGSEGCNIPQNIERLNGQGVCQIECGAQFSLALTKSGVVWTWGKGDYFRLGHGSDVHVRKPQVVEGLRGKKIVHVAVGALHCLAVTDSGQVYAWGDNDHGQQGNGTTTVNRKPTLVQGLEGQKITRVACGSSHSVAWTTVDVATPSVHEPVLFQTARDPLGASYLGVPSDADSSAASNKISGASNSKPNRPSLAKILLSLDGNLAKQQALSHILTALQIMYARDAVVGALMPAAMIAPVECPSFSSAAPSDASAMASPMNGEECMLAVDIEDRLSPNPWQEKREIVSSEDAVTPSAVTPSAPSASARPFIPVTDDLGAASIIAETMTKTKEDVESQNKAAGPEPQALDEFTSLLIADDTRVVVDLLKLSVCSRAGDRGRDVLSAVLSGMGTAYPQVADMLLELCVTELEDVATDSQSGRLSSQPVVVESSHPYTDDTSTSGTVKIPGAEGLRVEFDRQCSTERRHDPLTVMDGVNRIVSVRSGREWSDWSSELRIPGDELKWKFISDGSVNGWGWRFTVYPIMPAAGPKELLSDRCVLSCPSMDLVTCLLDFRLNLASNRSIVPRLAASLAACAQLSALAASHRMWALQRLRKLLTTEFGQSININRLLGENDGETRALSFTGSALAALVKGLPEALQRQFEYEDPIVRGGKQLLHSPFFKVLVALACDLELDTLPCCAETHKWAWFRRYCMASRVAVALDKRTPLPRLFLDEVAKKIRELMADSENMDVLHESHDIFKREQDEQLVQWMNRRPDDWTLSAGGSGTIYGWGHNHRGQLGGIEGAKVKVPTPCEALATLRPVQLIGGEQTLFAVTADGKLYATGYGAGGRLGIGGTESVSTPTLLESIQHVFIKKVAVNSGGKHCLALSSEGEVYSWGEAEDGKLGHGNRSPCDRPRVIESLRGIEVVDVAAGGAHSACVTAAGDLYTWGKGRYGRLGHSDSEDQLKPKLVEALQGHRVVDIACGSGDAQTLCLTDDDTVWSWGDGDYGKLGRGGSDGCKVPMKIDSLTGLGVVKVECGSQFSVALTKSGAVYTWGKGDYHRLGHGSDDHVRRPRQVQGLQGKKVIAIATGSLHCVCCTEDGEVYTWGDNDEGQLGDGTTNAIQRPRLVAALQGKKVNRVACGSAHTLAWSTSKPASAGKLPAQVPMEYNHLQEIPIIALRNRLLLLHHLSELFCPCIPMFDLEGSLDETGLGPSVGFDTLRGILISQGKEAAFRKVVQATMVRDRQHGPVVELNRIQVKRSRSKGGLAGPDGTKSVFGQMCAKMSSFGPDSLLLPHRVWKVKFVGESVDDCGGGYSESIAEICEELQNGLTPLLIVTPNGRDESGANRDCYLLSPAARAPVHSSMFRFLGVLLGIAIRTGSPLSLNLAEPVWKQLAGMSLTIADLSEVDKDFIPGLMYIRDNEATSEEFEAMSLPFTVPSASGQDIQLSSKHTHITLDNRAEYVRLAINYRLHEFDEQVAAVREGMARVVPVPLLSLFTGYELETMVCGSPDIPLHLLKSVATYKGIEPSASLIQWFWEVMESFSNTERSLFLRFVWGRTRLPRTIADFRGRDFVIQVLDKYNPPDHFLPESYTCFFLLKLPRYSCKQVLEEKLKYAIHFCKSIDTDDYARIALTGEPAADDSSDDSDNEDVDSFASDSTQDYLTGH

SEQ ID NO: 561 - protein, 593 aa, synthetic construct
MAEMGSKGVTAGKIASNVQKKLTRAQEKVLQKLGKADETKDEQFEQCVQNFNKQLTEGTRLQKDLRTYLASVKAMHEASKKLNECLQEVYEPDWPGRDEANKIAENNDLLWMDYHQKLVDQALLTMDTYLGQFPDIKSRIAKRGRKLVDYDSARHHYESLQTAKKKDEAKIAKPVSLLEKAAPQWCQGKLQAHLVAQTNLLRNQAEEELIKAQKVFEEMNVDLQEELPSLWNSRVGFYVNTFQSIAGLEENFHKEMSKLNQNLNDVLVGLEKQHGSNTFTVKAQPSDNAPAKGNKSPSPPDGSPAATPEIRVNHEPEPAGGATPGATLPKSPSQLRKGPPVPPPPKHTPSKEVKQEQILSLFEDTFVPEISVTTPSQFEAPGPFSEQASLLDLDFDPLPPVTSPVKAPTPSGQSIPWDLWEPTESPAGSLPSGEPSAAEGTFAVSWPSQTAEPGPAQPAEASEVAGGTQPAAGAQEPGETAASEAASSSLPAVVVETFPATVNGTVEGGSGAGRLDLPPGFMFKVQAQHDYTATDTDELQLKAGDVVLVIPFQNPEEQDEGWLMGVKESDWNQHKELEKCRGVFPENFTERVP

SEQ ID NO: 562 - protein, 344 aa, synthetic construct
MHRTTRIKITELNPHLMCALCGGYFIDATTIVECLHSFCKTCIVRYLETNKYCPMCDVQVHKTRPLLSIRSDKTLQDIVYKLVPGLFKDEMKRRRDFYAAYPLTEVPNGSNEDRGEVLEQEKGALSDDEIVSLSIEFYEGARDRDEKKGPLENGDGDKEKTGVRFLRCPAAMTVMHLAKFLRNKMDVPSKYKVEVLYEDEPLKEYYTLMDIAYIYPWRRNGPLPLKYRVQPACKRLTLATVPTPSEGTNTSGASECESVSDKAPSPATLPATSSSLPSPATPSHGSPSSHGPPATHPTSPTPPSTASGATTAANGGSLNCLQTPSSTSRGRKMTVNGAPVPPLT

SEQ ID NO: 563 - protein, 526 aa, synthetic construct
MDVRFYPPPAQPAAAPDAPCLGPSPCLDPYYCNKFDGENMYMSMTEPSQDYVPASQSYPGPSLESEDFNIPPITPPSLPDHSLVHLNEVESGYHSLCHPMNHNGLLPFHPQNMDLPEITVSNMLGQDGTLLSNSISVMPDIRNPEGTQYSSHPQMAAMRPRGQPADIRQQPGMMPHGQLTTINQSQLSAQLGLNMGGSNVPHNSPSPPGSKSATPSPSSSVHEDEGDDTSKINGGEKRPASDMGKKPKTPKKKKKKDPNEPQKPVSAYALFFRDTQAAIKGQNPNATFGEVSKIVASMWDGLGEEQKQVYKKKTEAAKKEYLKQLAAYRASLVSKSYSEPVDVKTSQPPQLINSKPSVFHGPSQAHSALYLSSHYHQQPGMNPHLTAMHPSLPRNIAPKPNNQMPVTVSIANMAVSPPPPLQISPPLHQHLNMQQHQPLTMQQPLGNQLPMQVQSALHSPTMQQGFTLQPDYQTIINPTSTAAQVVTQAMEYVRSGCRNPPPQPVDWNNDYCSSGGMQRDKALYLT

SEQ ID NO: 564 - protein, 472 aa, synthetic construct
MLGTVKMEGHETSDWNSYYADTQEAYSSVPVSNMNSGLGSMNSMNTYMTMNTMTTSGNMTPASFNMSYANPGLGAGLSPGAVAGMPGGSAGAMNSMTAAGVTAMGTALSPSGMGAMGAQQAASMNGLGPYAAAMNPCMSPMAYAPSNLGRSRAGGGGDAKTFKRSYPHAKPPYSYISLITMAIQQAPSKMLTLSEIYQWIMDLFPYYRQNQQRWQNSIRHSLSFNDCFVKVARSPDKPGKGSYWTLHPDSGNMFENGCYLRRQKRFKCEKQPGAGGGGGSGSGGSGAKGGPESRKDPSGASNPSADSPLHRGVHGKTGQLEGAPAPGPAASPQTLDHSGATATGGASELKTPASSTAPPISSGPGALASVPASHPAHGLAPHESQLHLKGDPHYSFNHPFSINNLMSSSEQQHKLDFKAYEQALQYSPYGSTLPASLPLGSASVTTRSPIEPSALEPAYYQGVYSRPVLNTS

SEQ ID NO: 565 - protein, 457 aa, synthetic construct
MLGAVKMEGHEPSDWSSYYAEPEGYSSVSNMNAGLGMNGMNTYMSMSAAAMGSGSGNMSAGSMNMSSYVGAGMSPSLAGMSPGAGAMAGMGGSAGAAGVAGMGPHLSPSLSPLGGQAAGAMGGLAPYANMNSMSPMYGQAGLSRARDPKTYRRSYTHAKPPYSYISLITMAIQQSPNKMLTLSEIYQWIMDLFPFYRQNQQRWQNSIRHSLSFNDCFLKVPRSPDKPGKGSFWTLHPDSGNMFENGCYLRRQKRFKCEKQLALKEAAGAAGSGKKAAAGAQASQAQLGEAAGPASETPAGTESPHSSASPCQEHKRGGLGELKGTPAAALSPPEPAPSPGQQQQAAAHLLGPPHHPGLPPEAHLKPEHHYAFNHPFSINNLMSSEQQHHHSHHHHQPHKMDLKAYEQVMHYPGYGSPMPGSLAMGPVTNKTGLDASPLAADTSYYQGVYSRPIMNSS

SEQ ID NO: 566 - protein, 584 aa, synthetic construct
MASVQASRRQWCYLCDLPKMPWAMVWDFSEAVCRGCVNFEGADRIELLIDAARQLKRSHVLPEGRSPGPPALKHPATKDLAAAAAQGPQLPPPQAQPQPSGTGGGVSGQDRYDRATSSGRLPLPSPALEYTLGSRLANGLGREEAVAEGARRALLGSMPGLMPPGLLAAAVSGLGSRGLTLAPGLSPARPLFGSDFEKEKQQRNADCLAELNEAMRGRAEEWHGRPKAVREQLLALSACAPFNVRFKKDHGLVGRVFAFDATARPPGYEFELKLFTEYPCGSGNVYAGVLAVARQMFHDALREPGKALASSGFKYLEYERRHGSGEWRQLGELLTDGVRSFREPAPAEALPQQYPEPAPAALCGPPPRAPSRNLAPTPRRRKASPEPEGEAAGKMTTEEQQQRHWVAPGGPYSAETPGVPSPIAALKNVAEALGHSPKDPGGGGGPVRAGGASPAASSTAQPPTQHRLVARNGEAEVSPTAGAEAVSGGGSGTGATPGAPLCCTLCRERLEDTHFVQCPSVPGHKFCFPCSREFIKAQGPAGEVYCPSGDKCPLVGSSVPWAFMQGEIATILAGDIKVKKERDP

SEQ ID NO: 567 - protein, 587 aa, synthetic construct
MAAAVAVAAASRRQSCYLCDLPRMPWAMIWDFTEPVCRGCVNYEGADRVEFVIETARQLKRAHGCFPEGRSPPGAAASAAAKPPPLSAKDILLQQQQQLGHGGPEAAPRAPQALERYPLAAAAERPPRLGSDFGSSRPAASLAQPPTPQPPPVNGILVPNGFSKLEEPPELNRQSPNPRRGHAVPPTLVPLMNGSATPLPTALGLGGRAAASLAAVSGTAAASLGSAQPTDLGAHKRPASVSSSAAVEHEQREAAAKEKQPPPPAHRGPADSLSTAAGAAELSAEGAGKSRGSGEQDWVNRPKTVRDTLLALHQHGHSGPFESKFKKEPALTAGRLLGFEANGANGSKAVARTARKRKPSPEPEGEVGPPKINGEAQPWLSTSTEGLKIPMTPTSSFVSPPPPTASPHSNRTTPPEAAQNGQSPMAALILVADNAGGSHASKDANQVHSTTRRNSNSPPSPSSMNQRRLGPREVGGQGAGNTGGLEPVHPASLPDSSLATSAPLCCTLCHERLEDTHFVQCPSVPSHKFCFPCSRQSIKQQGASGEVYCPSGEKCPLVGSNVPWAFMQGEIATILAGDVKVKKERDS

SEQ ID NO: 568 - protein, 796 aa, synthetic construct
MSAAQVSSSRRQSCYLCDLPRMPWAMIWDFSEPVCRGCVNYEGADRIEFVIETARQLKRAHGCFQDGRSPGPPPPVGVKTVALSAKEAAAAAAAAAAAAAAAQQQQQQQQQQQQQQQQQQQQQQQQQLNHVDGSSKPAVLAAPSGLERYGLSAAAAAAAAAAAAVEQRSRFEYPPPPVSLGSSSHTARLPNGLGGPNGFPKPTPEEGPPELNRQSPNSSSAAASVASRRGTHGGLVTGLPNPGGGGGPQLTVPPNLLPQTLLNGPASAAVLPPPPPHALGSRGPPTPAPPGAPGGPACLGGTPGVSATSSSASSSTSSSVAEVGVGAGGKRPGSVSSTDQERELKEKQRNAEALAELSESLRNRAEEWASKPKMVRDTLLTLAGCTPYEVRFKKDHSLLGRVFAFDAVSKPGMDYELKLFIEYPTGSGNVYSSASGVAKQMYQDCMKDFGRGLSSGFKYLEYEKKHGSGDWRLLGDLLPEAVRFFKEGVPGADMLPQPYLDASCPMLPTALVSLSRAPSAPPGTGALPPAAPSGRGAAASLRKRKASPEPPDSAEGALKLGEEQQRQQWMANQSEALKLTMSAGGFAAPGHAAGGPPPPPPPLGPHSNRTTPPESAPQNGPSPMAALMSVADTLGTAHSPKDGSSVHSTTASARRNSSSPVSPASVPGQRRLASRNGDLNLQVAPPPPSAHPGMDQVHPQNIPDSPMANSGPLCCTICHERLEDTHFVQCPSVPSHKFCFPCSRESIKAQGATGEVYCPSGEKCPLVGSNVPWAFMQGEIATILAGDVKVKKERDP

SEQ ID NO: 569 - protein, 388 aa, synthetic construct
MTASVLLHPRWIEPTVMFLYDNGGGLVADELNKNMEGAAAAAAAAAAAAAAGAGGGGFPHPAAAAAGGNFSVAAAAAAAAAAAANQCRNLMAHPAPLAPGAASAYSSAPGEAPPSAAAAAAAAAAAAAAAAAASSSGGPGPAGPAGAEAAKQCSPCSAAAQSSSGPAALPYGYFGSGYYPCARMGPHPNAIKSCAQPASAAAAAAFADKYMDTAGPAAEEFSSRAKEFAFYHQGYAAGPYHHHQPMPGYLDMPVVPGLGGPGESRHEPLGLPMESYQPWALPNGWNGQMYCPKEQAQPPHLWKSTLPDVVSHPSDASSYRRGRKKRVPYTKVQLKELEREYATNKFITKDKRRRISATTNLSERQVTIWFQNRRVKEKKVINKLKTTS

SEQ ID NO: 570 - protein, 284 aa, synthetic construct
MEPGNYATLDGAKDIEGLLGAGGGRNLVAHSPLTSHPAAPTLMPAVNYAPLDLPGSAEPPKQCHPCPGVPQGTSPAPVPYGYFGGGYYSCRVSRSSLKPCAQAATLAAYPAETPTAGEEYPSRPTEFAFYPGYPGTYQPMASYLDVSVVQTLGAPGEPRHDSLLPVDSYQSWALAGGWNSQMCCQGEQNPPGPFWKAAFADSSGQHPPDACAFRRGRKKRIPYSKGQLRELEREYAANKFITKDKRRKISAATSLSERQITIWFQNRRVKEKKVLAKVKNSATP

SEQ ID NO: 571 - protein, 330 aa, synthetic construct
MTTSLLLHPRWPESLMYVYEDSAAESGIGGGGGGGGGGTGGAGGGCSGASPGKAPSMDGLGSSCPASHCRDLLPHPVLGRPPAPLGAPQGAVYTDIPAPEAARQCAPPPAPPTSSSATLGYGYPFGGSYYGCRLSHNVNLQQKPCAYHPGDKYPEPSGALPGDDLSSRAKEFAFYPSFASSYQAMPGYLDVSVVPGISGHPEPRHDALIPVEGYQHWALSNGWDSQVYCSKEQSQSAHLWKSPFPDVVPLQPEVSSYRRGRKKRVPYTKVQLKELEKEYAASKFITKEKRRRISATTNLSERQVTIWFQNRRVKEKKVVSKSKAPHLHST

SEQ ID NO: 572 - protein, 313 aa, synthetic construct
MDFDERGPCSSNMYLPSCTYYVSGPDFSSLPSFLPQTPSSRPMTYSYSSNLPQVQPVREVTFREYAIEPATKWHPRGNLAHCYSAEELVHRDCLQAPSAAGVPGDVLAKSSANVYHHPTPAVSSNFYSTVGRNGVLPQAFDQFFETAYGTPENLASSDYPGDKSAEKGPPAATATSAAAAAAATGAPATSSSDSGGGGGCRETAAAAEEKERRRRPESSSSPESSSGHTEDKAGGSSGQRTRKKRCPYTKYQIRELEREFFFSVYINKEKRLQLSRMLNLTDRQVKIWFQNRRMKEKKINRDRLQYYSANPLL

SEQ ID NO: 573 - protein, 304 aa, synthetic construct
MFNSVNLGNFCSPSRKERGADFGERGSCASNLYLPSCTYYMPEFSTVSSFLPQAPSRQISYPYSAQVPPVREVSYGLEPSGKWHHRNSYSSCYAAADELMHRECLPPSTVTEILMKNEGSYGGHHHPSAPHATPAGFYSSVNKNSVLPQAFDRFFDNAYCGGGDPPAEPPCSGKGEAKGEPEAPPASGLASRAEAGAEAEAEEENTNPSSSGSAHSVAKEPAKGAAPNAPRTRKKRCPYSKFQIRELEREFFFNVYINKEKRLQLSRMLNLTDRQVKIWFQNRRMKEKKLSRDRLQYFSGNPLL

SEQ ID NO: 574 - protein, 342 aa, synthetic construct
MTCPRNVTPNSYAEPLAAPGGGERYSRSAGMYMQSGSDFNCGVMRGCGLAPSLSKRDEGSSPSLALNTYPSYLSQLDSWGDPKAAYRLEQPVGRPLSSCSYPPSVKEENVCCMYSAEKRAKSGPEAALYSHPLPESCLGEHEVPVPSYYRASPSYSALDKTPHCSGANDFEAPFEQRASLNPRAEHLESPQLGGKVSFPETPKSDSQTPSPNEIKTEQSLAGPKGSPSESEKERAKAADSSPDTSDNEAKEEIKAENTTGNWLTAKSGRKKRCPYTKHQTLELEKEFLFNMYLTRERRLEISKTINLTDRQVKIWFQNRRMKLKKMNRENRIRELTSNFNFT

SEQ ID NO: 575 - protein, 410 aa, synthetic construct
MSARKGYLLPSPNYPTTMSCSESPAANSFLVDSLISSGRGEAGGGGGGAGGGGGGGYYAHGGVYLPPAADLPYGLQSCGLFPTLGGKRNEAASPGSGGGGGGLGPGAHGYGPSPIDLWLDAPRSCRMEPPDGPPPPPQQQPPPPPQPPQPAPQATSCSFAQNIKEESSYCLYDSADKCPKVSATAAELAPFPRGPPPDGCALGTSSGVPVPGYFRLSQAYGTAKGYGSGGGGAQQLGAGPFPAQPPGRGFDLPPALASGSADAARKERALDSPPPPTLACGSGGGSQGDEEAHASSSAAEELSPAPSESSKASPEKDSLGNSKGENAANWLTAKSGRKKRCPYTKHQTLELEKEFLFNMYLTRERRLEISRSVHLTDRQVKIWFQNRRMKLKKMNRENRIRELTANFNFS

SEQ ID NO: 576 - protein, 250 aa, synthetic construct
MSISGTLSSYYVDSIISHESEDAPPAKFPSGQYASSRQPGHAEHLEFPSCSFQPKAPVFGASWAPLSPHASGSLPSVYHPYIQPQGVPPAESRYLRTWLEPAPRGEAAPGQGQAAVKAEPLLGAPGELLKQGTPEYSLETSAGREAVLSNQRPGYGDNKICEGSEDKERPDQTNPSANWLHARSSRKKRCPYTKYQTLELEKEFLFNMYLTRDRRHEVARLLNLSERQVKIWFQNRRMKMKKMNKEQGKE

SEQ ID NO: 577 - protein, 272 aa, synthetic construct
MATTGALGNYYVDSFLLGADAADELSVGRYAPGTLGQPPRQAATLAEHPDFSPCSFQSKATVFGASWNPVHAAGANAVPAAVYHHHHHHPYVHPQAPVAAAAPDGRYMRSWLEPTPGALSFAGLPSSRPYGIKPEPLSARRGDCPTLDTHTLSLTDYACGSPPVDREKQPSEGAFSENNAENESGGDKPPIDPNNPAANWLHARSTRKKRCPYTKHQTLELEKEFLFNMYLTRDRRYEVARLLNLTERQVKIWFQNRRMKMKKINKDRAKDE

SEQ ID NO: 578 - protein, 80 aa, synthetic construct
NKKLEAVGTGIEPKAMSQGLVTFGDVAVDFSQEEWEWLNPIQRNLYRKVMLENYRNLASLGLCVSKPDVISSLEQGKEPW

SEQ ID NO: 579 - protein, 80 aa, synthetic construct
KMKKFQIPVSFQDLTVNFTQEEWQQLDPAQRLLYRDVMLENYSNLVSVGYHVSKPDVIFKLEQGEEPWIVEEFSNQNYPD

SEQ ID NO: 580 - protein, 80 aa, synthetic construct
CSQESALSEEEEDTTRPLETVTFKDVAVDLTQEEWEQMKPAQRNLYRDVMLENYSNLVTVGCQVTKPDVIFKLEQEEEPW

SEQ ID NO: 581 - protein, 80 aa, synthetic construct
ITSQGSVSFRDVTVGFTQEEWQHLDPAQRTLYRDVMLENYSHLVSVGYCIPKPEVILKLEKGEEPWILEEKFPSQSHLEL

SEQ ID NO: 582 - protein, 80 aa, synthetic construct
PQVTFNDVAIDFTHEEWGWLSSAQRDLYKDVMVQNYENLVSVAGLSVTKPYVITLLEDGKEPWMMEKKLSKGMIPDWESR

SEQ ID NO: 583 - protein, 80 aa, synthetic construct
PLRFSTLFQEQQKMNISQASVSFKDVTIEFTQEEWQQMAPVQKNLYRDVMLENYSNLVSVGYCCFKPEVIFKLEQGEEPW

SEQ ID NO: 584 - protein, 80 aa, synthetic construct
QDPSAEGLSEEVPVVFEELPVVFEDVAVYFTREEWGMLDKRQKELYRDVMRMNYELLASLGPAAAKPDLISKLERRAAPW

SEQ ID NO: 585 - protein, 80 aa, synthetic construct
SQGSVTFRDVAIDFSQEEWKWLQPAQRDLYRCVMLENYGHLVSLGLSISKPDVVSLLEQGKEPWLGKREVKRDLFSVSES

SEQ ID NO: 586 - protein, 80 aa, synthetic construct
GSLTFRDVAIEFSLEEWQCLDTAQQNLYRNVMLENYRNLVFLGIAAFKPDLIIFLEEGKESWNMKRHEMVEESPVICSHF

SEQ ID NO: 587 - protein, 80 aa, synthetic construct
NKSQEQVSFKDVCVDFTQEEWYLLDPAQKILYRDVILENYSNLVSVGYCITKPEVIFKIEQGEEPWILEKGFPSQCHPER

SEQ ID NO: 588 - protein, 80 aa, synthetic construct
PHLLVTFRDVAIDFSQEEWECLDPAQRDLYRDVMLENYSNLISLDLESSCVTKKLSPEKEIYEMESLQWENMGKRINHHL

SEQ ID NO: 589 - protein, 80 aa, synthetic construct
EEERKTAELQKNRIQDSVVFEDVAVDFTQEEWALLDLAQRNLYRDVMLENFQNLASLGYPLHTPHLISQWEQEEDLQTVK

SEQ ID NO: 590 - protein, 80 aa, synthetic construct
GLLTFRDVAIEFSLEEWQCLDTAQKNLYRNVMLENYRNLAFLGIAVSKPDLIICLEKEKEPWNMKRDEMVDEPPGICPHF

SEQ ID NO: 591 - protein, 80 aa, synthetic construct
RAPTQVTVSPETHMDLTKGCVTFEDIAIYFSQDEWGLLDEAQRLLYLEVMLENFALVASLGCGHGTEDEETPSDQNVSVG

SEQ ID NO: 592 - protein, 80 aa, synthetic construct
AAVSPTTRCQESVTFEDVAVVFTDEEWSRLVPIQRDLYKEVMLENYNSIVSLGLPVPQPDVIFQLKRGDKPWMVDLHGSE

SEQ ID NO: 593 - protein, 80 aa, synthetic construct
HSLEKVTFEDVAIDFTQEEWDMMDTSKRKLYRDVMLENISHLVSLGYQISKSYIILQLEQGKELWREGRVFLQDQNPDRE

SEQ ID NO: 594 - protein, 80 aa, synthetic construct
DSVSFEDVAVNFTLEEWALLDSSQKKLYEDVMQETFKNLVCLGKKWEDQDIEDDHRNQGKNRRCHMVERLCESRRGSKCG

SEQ ID NO: 595 - protein, 80 aa, synthetic construct
NVEVVKVMPQDLVTFKDVAIDFSQEEWQWMNPAQKRLYRSMMLENYQSLVSLGLCISKPYVISLLEQGREPWEMTSEMTR

SEQ ID NO: 596 - protein, 80 aa, synthetic construct
TQPDEDLHLQAEETQLVKESVTFKDVAIDFTLEEWRLMDPTQRNLHKDVMLENYRNLVSLGLAVSKPDMISHLENGKGPW

SEQ ID NO: 597 - protein, 80 aa, synthetic construct
TMLQESFSFDDLSVDFTQKEWQLLDPSQKNLYKDVMLENYSSLVSLGYEVMKPDVIFKLEQGEEPWVGDGEIPSSDSPEV

SEQ ID NO: 598 - protein, 80 aa, synthetic construct
EVVTFGDVAVHFSREEWQCLDPGQRALYREVMLENHSSVAGLAGFLVFKPELISRLEQGEEPWVLDLQGAEGTEAPRTSK

SEQ ID NO: 599 - protein, 80 aa, synthetic construct
RNAEEERMIAVFLTTWLQEPMTFKDVAVEFTQEEWMMLDSAQRSLYRDVMLENYRNLTSVEYQLYRLTVISPLDQEEIRN

SEQ ID NO: 600 - protein, 80 aa, synthetic construct
GPQGARRQAFLAFGDVTVDFTQKEWRLLSPAQRALYREVTLENYSHLVSLGILHSKPELIRRLEQGEVPWGEERRRRPGP

SEQ ID NO: 601 - protein, 80 aa, synthetic construct
HSLKKLTFEDVAIDFTQEEWAMMDTSKRKLYRDVMLENISHLVSLGYQISKSYIILQLEQGKELWREGRVFLQDQNPNRE

SEQ ID NO: 602 - protein, 80 aa, synthetic construct
MPEVEFPDQFFTVLTMDHELVTLRDVVINFSQEEWEYLDSAQRNLYWDVMMENYSNLLSLDLESRNETKHLSVGKDIIQN

SEQ ID NO: 603 - protein, 80 aa, synthetic construct
PGAPGSLEMGPLTFRDVTIEFSLEEWQCLDTVQQNLYRDVMLENYRNLVFLGMAVFKPDLITCLKQGKEPWNMKRHEMVT

SEQ ID NO: 604 - protein, 80 aa, synthetic construct
RDPAQVPVAADLLTDHEEGYVTFEDVAVYFSQEEWRLLDDAQRLLYRNVMLENFTLLASLGLASSKTHEITQLESWEEPF

SEQ ID NO: 605 - protein, 80 aa, synthetic construct
HSLKKVTFEDVAIDFTQEEWAMMDTSKRKLYRDVMLENISHLVSLGYQISKSYIILQLEQGKELWREGREFLQDQNPDRE

SEQ ID NO: 606 - protein, 80 aa, synthetic construct
TKSKEAVTFKDVAVVFSEEELQLLDLAQRKLYRDVMLENFRNVVSVGHQSTPDGLPQLEREEKLWMMKMATQRDNSSGAK

SEQ ID NO: 607 - protein, 80 aa, synthetic construct
SQVTFSDVAIDFSHEEWACLDSAQRDLYKDVMVQNYENLVSVGLSVTKPYVIMLLEDGKEPWMMEKKLSKAYPFPLSHSV

SEQ ID NO: 608 - protein, 80 aa, synthetic construct
PGPLRSLEMESLQFRDVAVEFSLEEWHCLDTAQQNLYRDVMLENYRHLVFLGIIVSKPDLITCLEQGIKPLTMKRHEMIA

SEQ ID NO: 609 - protein, 80 aa, synthetic construct
LQTTWPQESVTFEDVAVYFTQNQWASLDPAQRALYGEVMLENYANVASLVAFPFPKPALISHLERGEAPWGPDPWDTEIL

SEQ ID NO: 610 - protein, 80 aa, synthetic construct
APLLAPRPGETRPGCRKPGTVSFADVAVYFSPEEWGCLRPAQRALYRDVMQETYGHLGALGFPGPKPALISWMEQESEAW

SEQ ID NO: 611 - protein, 80 aa, synthetic construct
NKVEQKSQESVSFKDVTVGFTQEEWQHLDPSQRALYRDVMLENYSNLVSVGYCVHKPEVIFRLQQGEEPWKQEEEFPSQS

SEQ ID NO: 612 - protein, 80 aa, synthetic construct
CFSQEERMAAGYLPRWSQELVTFEDVSMDFSQEEWELLEPAQKNLYREVMLENYRNVVSLEALKNQCTDVGIKEGPLSPA

SEQ ID NO: 613 - protein, 80 aa, synthetic construct
DSVAFEDVAVNFTQEEWALLDPSQKNLYREVMQETLRNLTSIGKKWNNQYIEDEHQNPRRNLRRLIGERLSESKESHQHG

SEQ ID NO: 614 - protein, 80 aa, synthetic construct
MGPAQVPMNSEVIVDPIQGQVNFEDVFVYFSQEEWVLLDEAQRLLYRDVMLENFALMASLGHTSFMSHIVASLVMGSEPW

SEQ ID NO: 615 - protein, 80 aa, synthetic construct
TTFKEAMTFKDVAVVFTEEELGLLDLAQRKLYRDVMLENFRNLLSVGHQAFHRDTFHFLREEKIWMMKTAIQREGNSGDK

SEQ ID NO: 616 - protein, 80 aa, synthetic construct
DSTLLQGGHNLLSSASFQEAVTFKDVIVDFTQEEWKQLDPGQRDLFRDVTLENYTHLVSIGLQVSKPDVISQLEQGTEPW

SEQ ID NO: 617 - protein, 80 aa, synthetic construct
EARSMLVPPQASVCFEDVAMAFTQEEWEQLDLAQRTLYREVTLETWEHIVSLGLFLSKSDVISQLEQEEDLCRAEQEAPR

SEQ ID NO: 618 - protein, 80 aa, synthetic construct
DSVVFEDVAVDFTLEEWALLDSAQRDLYRDVMLETFRNLASVDDGTQFKANGSVSLQDMYGQEKSKEQTIPNFTGNNSCA

SEQ ID NO: 619 - protein, 80 aa, synthetic construct
EESHGALISSCNSRTMTDGLVTFRDVAIDFSQEEWECLDPAQRDLYVDVMLENYSNLVSLDLESKTYETKKIFSENDIFE

SEQ ID NO: 620 - protein, 80 aa, synthetic construct
VITPQIPMVTEEFVKPSQGHVTFEDIAVYFSQEEWGLLDEAQRCLYHDVMLENFSLMASVGCLHGIEAEEAPSEQTLSAQ

SEQ ID NO: 621 - protein, 80 aa, synthetic construct
VQLRPQTRMATALRDPASGSVTFEDVAVYFSWEEWDLLDEAQKHLYFDVMLENFALTSSLGCWCGVEHEETPSEQRISGE

SEQ ID NO: 622 - protein, 80 aa, synthetic construct
MQAQESLTLEDVAVDFTWEEWQFLSPAQKDLYRDVMLENYSNLVAVGYQASKPDALSKLERGEETCTTEDEIYSRICSEI

SEQ ID NO: 623 - protein, 80 aa, synthetic construct
GPLQFRDVAIEFSLEEWHCLDTAQRNLYRDVMLENYRNLVFLGIVVSKPDLVTCLEQGKKPLTMERHEMIAKPPVMSSHF

SEQ ID NO: 624 - protein, 80 aa, synthetic construct
NMFKEAVTFKDVAVAFTEEELGLLGPAQRKLYRDVMVENFRNLLSVGHPPFKQDVSPIERNEQLWIMTTATRRQGNLGEK

SEQ ID NO: 625 - protein, 80 aa, synthetic construct
GALTFRDVAIEFSLEEWQCLDTEQQNLYRNVMLDNYRNLVFLGIAVSKPDLITCLEQEKEPWNLKTHDMVAKPPVICSHI

SEQ ID NO: 626 - protein, 80 aa, synthetic construct
SPQKSSALAPEDHGSSYEGSVSFRDVAIDFSREEWRHLDPSQRNLYRDVMLETYSHLLSVGYQVPEAEVVMLEQGKEPWA

SEQ ID NO: 627 - protein, 80 aa, synthetic construct
ELLTFRDVAIEFSPEEWKCLDPAQQNLYRDVMLENYRNLISLGVAISNPDLVIYLEQRKEPYKVKIHETVAKHPAVCSHF

SEQ ID NO: 628 - protein, 80 aa, synthetic construct
EPLKFRDVAIEFSLEEWQCLDTIQQNLYRNVMLENYRNLVFLGIVVSKPDLITCLEQEKEPWTRKRHRMVAEPPVICSHF

SEQ ID NO: 629 - protein, 80 aa, synthetic construct
PSARGKSKSKAPITFGDLAIYFSQEEWEWLSPIQKDLYEDVMLENYRNLVSLGLSFRRPNVITLLEKGKAPWMVEPVRRR

SEQ ID NO: 630 - protein, 80 aa, synthetic construct
TKAQESLTLEDVAVDFTWEEWQFLSPAQKDLYRDVMLENYSNLVSVGYQAGKPDALTKLEQGEPLWTLEDEIHSPAHPEI

SEQ ID NO: 631 - protein, 80 aa, synthetic construct
SQEEVEVAGIKLCKAMSLGSVTFTDVAIDFSQDEWEWLNLAQRSLYKKVMLENYRNLVSVGLCISKPDVISLLEQEKDPW

SEQ ID NO: 632 - protein, 80 aa, synthetic construct
TKSLESVSFKDVTVDFSRDEWQQLDLAQKSLYREVMLENYFNLISVGCQVPKPEVIFSLEQEEPCMLDGEIPSQSRPDGD

SEQ ID NO: 633 - protein, 80 aa, synthetic construct
SGCPGAERNLLVYSYFEKETLTFRDVAIEFSLEEWECLNPAQQNLYMNVMLENYKNLVFLGVAVSKQDPVTCLEQEKEPW

SEQ ID NO: 634 - protein, 80 aa, synthetic construct
PLQGSVSFKDVTVDFTQEEWQQLDPAQKALYRDVMLENYCHFVSVGFHMAKPDMIRKLEQGEELWTQRIFPSYSYLEEDG

SEQ ID NO: 635 - protein, 80 aa, synthetic construct
PGPPRSLEMGLLTFRDVAIEFSLEEWQHLDIAQQNLYRNVMLENYRNLAFLGIAVSKPDLITCLEQGKEPWNMKRHEMVD

SEQ ID NO: 636 - protein, 80 aa, synthetic construct
SGHPGSWEMNSVAFEDVAVNFTQEEWALLDPSQKNLYRDVMQETFRNLASIGNKGEDQSIEDQYKNSSRNLRHIISHSGN

SEQ ID NO: 637 - protein, 80 aa, synthetic construct
SYGSITFGDVAIDFSHQEWEYLSLVQKTLYQEVMMENYDNLVSLAGHSVSKPDLITLLEQGKEPWMIVREETRGECTDLD

SEQ ID NO: 638 - protein, 80 aa, synthetic construct
DLFVCSGLEPHTPSVGSQESVTFQDVAVDFTEKEWPLLDSSQRKLYKDVMLENYSNLTSLGYQVGKPSLISHLEQEEEPR

SEQ ID NO: 639 - protein, 80 aa, synthetic construct
FQTAWRQEPVTFEDVAVYFTQNEWASLDSVQRALYREVMLENYANVASLAFPFTTPVLVSQLEQGELPWGLDPWEPMGRE

SEQ ID NO: 640 - protein, 80 aa, synthetic construct
ELLTFRDVAIEFSPEEWKCLDPDQQNLYRDVMLENYRNLVSLGVAISNPDLVTCLEQRKEPYNVKIHKIVARPPAMCSHF

SEQ ID NO: 641 - protein, 80 aa, synthetic construct
AGEAEAQLDPSLQGLVMFEDVTVYFSREEWGLLNVTQKGLYRDVMLENFALVSSLGLAPSRSPVFTQLEDDEQSWVPSWV

SEQ ID NO: 642 - protein, 80 aa, synthetic construct
AHALVTFRDVAIDFSQKEWECLDTTQRKLYRDVMLENYNNLVSLGYSGSKPDVITLLEQGKEPCVVARDVTGRQCPGLLS

SEQ ID NO: 643 - protein, 80 aa, synthetic construct
KRIKHWKMASKLILPESLSLLTFEDVAVYFSEEEWQLLNPLEKTLYNDVMQDIYETVISLGLKLKNDTGNDHPISVSTSE

SEQ ID NO: 644 - protein, 80 aa, synthetic construct
DSVVFEDVAVDFTLEEWALLDSAQRDLYRDVMLETFQNLASVDDETQFKASGSVSQQDIYGEKIPKESKIATFTRNVSWA

SEQ ID NO: 645 - protein, 80 aa, synthetic construct
NMSQASVSFQDVTVEFTREEWQHLGPVERTLYRDVMLENYSHLISVGYCITKPKVISKLEKGEEPWSLEDEFLNQRYPGY

SEQ ID NO: 646 - protein, 80 aa, synthetic construct
ISFQESVTFQDVAVDFTAEEWQLLDCAERTLYWDVMLENYRNLISVGCPITKTKVILKVEQGQEPWMVEGANPHESSPES

SEQ ID NO: 647 - protein, 80 aa, synthetic construct
NTLQGPVSFKDVAVDFTQEEWQQLDPDEKITYRDVMLENYSHLVSVGYDTTKPNVIIKLEQGEEPWIMGGEFPCQHSPEA

SEQ ID NO: 648 - protein, 80 aa, synthetic construct
HPEEEERMHDELLQAVSKGPVMFRDVSIDFSQEEWECLDADQMNLYKEVMLENFSNLVSVGLSNSKPAVISLLEQGKEPW

SEQ ID NO: 649 - protein, 80 aa, synthetic construct
SLGSELFRDVAIVFSQEEWQWLAPAQRDLYRDVMLETYSNLVSLGLAVSKPDVISFLEQGKEPWMVERVVSGGLCPVLES

SEQ ID NO: 650 - protein, 80 aa, synthetic construct
TKFQEMVTFKDVAVVFTEEELGLLDSVQRKLYRDVMLENFRNLLLVAHQPFKPDLISQLEREEKLLMVETETPRDGCSGR

SEQ ID NO: 651 - protein, 80 aa, synthetic construct
AKRPGPPGSREMGLLTFRDIAIEFSLAEWQCLDHAQQNLYRDVMLENYRNLVSLGIAVSKPDLITCLEQNKEPQNIKRNE

SEQ ID NO: 652 - protein, 80 aa, synthetic construct
TCMVHRQTMSCSGAGGITAFVAFRDVAVYFTQEEWRLLSPAQRTLHREVMLETYNHLVSLEIPSSKPKLIAQLERGEAPW

SEQ ID NO: 653 - protein, 80 aa, synthetic construct
IQAQESITLEDVAVDFTWEEWQLLGAAQKDLYRDVMLENYSNLVAVGYQASKPDALFKLEQGEQLWTIEDGIHSGACSDI

SEQ ID NO: 654 - protein, 80 aa, synthetic construct
AQKRRKRKAKESGMALPQGHLTFRDVAIEFSQAEWKCLDPAQRALYKDVMLENYRNLVSLGISLPDLNINSMLEQRREPW

SEQ ID NO: 655 - protein, 80 aa, synthetic construct
DSTSVPVTAEAKLMGFTQGCVTFEDVAIYFSQEEWGLLDEAQRLLYRDVMLENFALITALVCWHGMEDEETPEQSVSVEG

SEQ ID NO: 656 - protein, 80 aa, synthetic construct
GPLTFRDVKIEFSLEEWQCLDTAQRNLYRDVMLENYRNLVFLGIAVSKPDLITWLEQGKEPWNLKRHEMVDKTPVMCSHF

SEQ ID NO: 657 - protein, 80 aa, synthetic construct
SGCPGAERSLLVQSYFEKGPLTFRDVAIEFSLEEWQCLDSAQQGLYRKVMLENYRNLVFLAGIALTKPDLITCLEQGKEP

SEQ ID NO: 658 - protein, 80 aa, synthetic construct
GVLTFRDVAVEFSPEEWECLDSAQQRLYRDVMLENYGNLVSLGLAIFKPDLMTCLEQRKEPWKVKRQEAVAKHPAGSFHF

SEQ ID NO: 659 - protein, 80 aa, synthetic construct
KENLEDISGWGLPEARSKESVSFKDVAVDFTQEEWGQLDSPQRALYRDVMLENYQNLLALGPPLHKPDVISHLERGEEPW

SEQ ID NO: 660 - protein, 80 aa, synthetic construct
EESEKPRGFARGLEPERIIGATDSSGELMFLMKWKNSDEADLVPAKEANVKCPQVVISFYEERLTWHSYPSEDDDKKDDK

SEQ ID NO: 661 - protein, 80 aa, synthetic construct
ASVALEDVAVNFTREEWALLGPCQKNLYKDVMQETIRNLDCVVMKWKDQNIEDQYRYPRKNLRCRMLERFVESKDGTQCG

SEQ ID NO: 662 - protein, 80 aa, synthetic construct
TLLTFRDVAIEFSLEEWKCLDLAQQNLYRDVMLENYRNLFSVGLTVCKPGLITCLEQRKEPWNVKRQEAADGHPEMGFHH

SEQ ID NO: 663 - protein, 80 aa, synthetic construct
AAALRAPTQQVFVAFEDVAIYFSQEEWELLDEMQRLLYRDVMLENFAVMASLGCWCGAVDEGTPSAESVSVEELSQGRTP

SEQ ID NO: 664 - protein, 80 aa, synthetic construct
NTFQASVSFQDVTVEFSQEEWQHMGPVERTLYRDVMLENYSHLVSVGYCFTKPELIFTLEQGEDPWLLEKEKGFLSRNSP

SEQ ID NO: 665 - protein, 80 aa, synthetic construct
DSVAFEDVSVSFSQEEWALLAPSQKKLYRDVMQETFKNLASIGEKWEDPNVEDQHKNQGRNLRSHTGERLCEGKEGSQCA

SEQ ID NO: 666 - protein, 80 aa, synthetic construct
AQGLVTFADVAIDFSQEEWACLNSAQRDLYWDVMLENYSNLVSLDLESAYENKSLPTEKNIHEIRASKRNSDRRSKSLGR

SEQ ID NO: 667 - protein, 80 aa, synthetic construct
AVDLLSAQEPVTFRDVAVFFSQDEWLHLDSAQRALYREVMLENYSSLVSLGIPFSMPKLIHQLQQGEDPCMVEREVPSDT

SEQ ID NO: 668 - protein, 80 aa, synthetic construct
SPQRFPALIPGEPGRSFEGSVSFEDVAVDFTRQEWHRLDPAQRTMHKDVMLETYSNLASVGLCVAKPEMIFKLERGEELW

SEQ ID NO: 669 - protein, 80 aa, synthetic construct
RVLTFRDVAVEFSPEEWECLDSAQQRLYRDVMLENYGNLFSLGLAIFKPDLITYLEQRKEPWNARRQKTVAKHPAGSLHF

SEQ ID NO: 670 - protein, 80 aa, synthetic construct
AETKDAAQMLVTFKDVAVTFTREEWRQLDLAQRTLYREVMLETCGLLVSLGHRVPKPELVHLLEHGQELWIVKRGLSHAT

SEQ ID NO: 671 - protein, 80 aa, synthetic construct
IEYQIPVSFKDVVVGFTQEEWHRLSPAQRALYRDVMLETYSNLVSVGYEGTKPDVILRLEQEEAPWIGEAACPGCHCWED

SEQ ID NO: 672 - protein, 80 aa, synthetic construct
TKFQEAVTFKDVAVAFTEEELGLLDSAQRKLYRDVMLENFRNLVSVGHQSFKPDMISQLEREEKLWMKELQTQRGKHSGD

SEQ ID NO: 673 - protein, 80 aa, synthetic construct
DEGVAGVMSVGPPAARLQEPVTFRDVAVDFTQEEWGQLDPTQRILYRDVMLETFGHLLSIGPELPKPEVISQLEQGTELW

SEQ ID NO: 674 - protein, 80 aa, synthetic construct
GPLTFMDVAIEFSVEEWQCLDTAQQNLYRNVMLENYRNLVFLGIAVSKPDLITCLEQGKEPWNMERHEMVAKPPGMCCYF

SEQ ID NO: 675 - protein, 80 aa, synthetic construct
HQVGLIRSYNSKTMTCFQELVTFRDVAIDFSRQEWEYLDPNQRDLYRDVMLENYRNLVSLGGHSISKPVVVDLLERGKEP

SEQ ID NO: 676 - protein, 80 aa, synthetic construct
NATIVMSVRREQGSSSGEGSLSFEDVAVGFTREEWQFLDQSQKVLYKEVMLENYINLVSIGYRGTKPDSLFKLEQGEPPG

SEQ ID NO: 677 - protein, 80 aa, synthetic construct
FPPARGKELLSFEDVAMYFTREEWGHLNWGQKDLYRDVMLENYRNMVLLGFQFPKPEMICQLENWDEQWILDLPRTGNRK

SEQ ID NO: 678 - protein, 80 aa, synthetic construct
ELLTFKDVAIEFSPEEWKCLDTSQQNLYRDVMLENYRNLVSLGVSISNPDLVTSLEQRKEPYNLKIHETAARPPAVCSHF

SEQ ID NO: 679 - protein, 80 aa, synthetic construct
MKSQGLVSFKDVAVDFTQEEWQQLDPSQRTLYRDVMLENYSHLVSMGYPVSKPDVISKLEQGEEPWIIKGDISNWIYPDE

SEQ ID NO: 680 - protein, 80 aa, synthetic construct
AEGSVMFSDVSIDFSQEEWDCLDPVQRDLYRDVMLENYGNLVSMGLYTPKPQVISLLEQGKEPWMVGRELTRGLCSDLES

SEQ ID NO: 681 - protein, 80 aa, synthetic construct
GPLTFTDVAIEFSLEEWQCLDTAQQNLYRNVMLENYRNLVFLGIAVSKPDLITCLEKEKEPCKMKRHEMVDEPPVVCSHF

SEQ ID NO: 682 - protein, 80 aa, synthetic construct
ALSQGLFTFKDVAIEFSQEEWECLDPAQRALYRDVMLENYRNLLSLDEDNIPPEDDISVGFTSKGLSPKENNKEELYHLV

SEQ ID NO: 683 - protein, 80 aa, synthetic construct
NMEGLVMFQDLSIDFSQEEWECLDAAQKDLYRDVMMENYSSLVSLGLSIPKPDVISLLEQGKEPWMVSRDVLGGWCRDSE

SEQ ID NO: 684 - protein, 80 aa, synthetic construct
AVSHLPTMVQESVTFKDVAILFTQEEWGQLSPAQRALYRDVMLENYSNLVSLGLLGPKPDTFSQLEKREVWMPEDTPGGF

SEQ ID NO: 685 - protein, 80 aa, synthetic construct
GPLTIRDVTVEFSLEEWHCLDTAQQNLYRDVMLENYRNLVFLGIAVSKPDLITCLEQGKEPCNMKRHEMVAKPPVMCSHI

SEQ ID NO: 686 - protein, 80 aa, synthetic construct
AAAVLTDRAQVSVTFDDVAVTFTKEEWGQLDLAQRTLYQEVMLENCGLLVSLGCPVPKAELICHLEHGQEPWTRKEDLSQ

SEQ ID NO: 687 - protein, 80 aa, synthetic construct
ALRSVMFSDVSIDFSPEEWEYLDLEQKDLYRDVMLENYSNLVSLGCFISKPDVISSLEQGKEPWKVVRKGRRQYPDLETK

SEQ ID NO: 688 - protein, 80 aa, synthetic construct
AHGSVTFRDVAIDFSQEEWEFLDPAQRDLYRDVMWENYSNFISLGPSISKPDVITLLDEERKEPGMVVREGTRRYCPDLE

SEQ ID NO: 689 - protein, 80 aa, synthetic construct
APRAQIQGPLTFGDVAVAFTRIEWRHLDAAQRALYRDVMLENYGNLVSVGLLSSKPKLITQLEQGAEPWTEVREAPSGTH

SEQ ID NO: 690 - protein, 80 aa, synthetic construct
GPLQFRDVAIEFSLEEWHCLDTAQRNLYRNVMLENYRNLVFLGIVVSKPDLITCLEQGKKPLTMKKHEMVANPSVTCSHF

SEQ ID NO: 691 - protein, 80 aa, synthetic construct
TLPRGQPEVLEWGLPKDQDSVAFEDVAVNFTHEEWALLGPSQKNLYRDVMRETIRNLNCIGMKWENQNIDDQHQNLRRNP

SEQ ID NO: 692 - protein, 80 aa, synthetic construct
PSPDSMTFEDIIVDFTQEEWALLDTSQRKLFQDVMLENISHLVSIGKQLCKSVVLSQLEQVEKLSTQRISLLQGREVGIK

SEQ ID NO: 693 - protein, 80 aa, synthetic construct
EESREIRAGQIVLKAMAQGLVTFRDVAIEFSLEEWKCLEPAQRDLYREVTLENFGHLASLGLSISKPDVVSLLEQGKEPW

SEQ ID NO: 694 - protein, 80 aa, synthetic construct
AASAQVSVTFEDVAVTFTQEEWGQLDAAQRTLYQEVMLETCGLLMSLGCPLFKPELIYQLDHRQELWMATKDLSQSSYPG

SEQ ID NO: 695 - protein, 80 aa, synthetic construct
RESLEDEVTPGLPTAESQELLTFKDISIDFTQEEWGQLAPAHQNLYREVMLENYSNLVSVGYQLSKPSVISQLEKGEEPW

SEQ ID NO: 696 - protein, 80 aa, synthetic construct
EGEYIKLKVIGQDSSEIHFKVKMTTHLKKLKESYCQRQGVPMNSLRFLFEGQRIADNHTPKELGMEEEDVIEVYQEQTGG

SEQ ID NO: 697 - protein, 80 aa, synthetic construct
NKSLGPVSFKDVAVDFTQEEWQQLDPEQKITYRDVMLENYSNLVSVGYHIIKPDVISKLEQGEEPWIVEGEFLLQSYPDE

SEQ ID NO: 698 - protein, 80 aa, synthetic construct
SPGLLTTRKEALMAFRDVAVAFTQKEWKLLSSAQRTLYREVMLENYSHLVSLGIAFSKPKLIEQLEQGDEPWREENEHLL

SEQ ID NO: 699 - protein, 80 aa, synthetic construct
MFQDSVAFEDVAVTFTQEEWALLDPSQKNLCRDVMQETFRNLASIGKKWKPQNIYVEYENLRRNLRIVGERLFESKEGHQ

SEQ ID NO: 700 - protein, 80 aa, synthetic construct
ENDHINLKVAGQDGSVVQFKIKRHTPLSKLMKAYCERQGLSMRQIRFRFDGQPINETDTPAQLEMEDEDTIDVFQQQTGG

SEQ ID NO: 701 - protein, 80 aa, synthetic construct
PGPLGSLEMGVLTFRDVALEFSLEEWQCLDTAQQNLYRNVMLENYRNLVFVGIAASKPDLITCLEQGKEPWNVKRHEMVT

SEQ ID NO: 702 - protein, 80 aa, synthetic construct
LSQKPQVLGPEKQDGSCEASVSFEDVTVDFSREEWQQLDPAQRCLYRDVMLELYSHLFAVGYHIPNPEVIFRMLKEKEPR

SEQ ID NO: 703 - protein, 80 aa, synthetic construct
ALTQGQVTFRDVAIEFSQEEWTCLDPAQRTLYRDVMLENYRNLASLGISCFDLSIISMLEQGKEPFTLESQVQIAGNPDG

SEQ ID NO: 704 - protein, 80 aa, synthetic construct
NKFQGPVTLKDVIVEFTKEEWKLLTPAQRTLYKDVMLENYSHLVSVGYHVNKPNAVFKLKQGKEPWILEVEFPHRGFPED

SEQ ID NO: 705 - protein, 80 aa, synthetic construct
ELLTFRDVAIEFSPEEWKCLDPAQQNLYRDVMLENYRNLVSLAVYSYYNQGILPEQGIQDSFKKATLGRYGSCGLENICL

SEQ ID NO: 706 - protein, 80 aa, synthetic construct
SPQKSSALAPEDHGSSYEGSVSFRDVAIDFSREEWRHLDLSQRNLYRDVMLETYSHLLSVGYQVPKPEVVMLEQGKEPWA

SEQ ID NO: 707 - protein, 80 aa, synthetic construct
NNSQGRVTFEDVTVNFTQGEWQRLNPEQRNLYRDVMLENYSNLVSVGQGETTKPDVILRLEQGKEPWLEEEEVLGSGRAE

SEQ ID NO: 708 - protein, 80 aa, synthetic construct
AMALPMPGPQEAVVFEDVAVYFTRIEWSCLAPDQQALYRDVMLENYGNLASLGFLVAKPALISLLEQGEEPGALILQVAE

SEQ ID NO: 709 - protein, 80 aa, synthetic construct
DSSQHLVTFEDVAVDFTQEEWTLLDQAQRDLYRDVMLENYKNLIILAGSELFKRSLMSGLEQMEELRTGVTGVLQELDLQ

SEQ ID NO: 710 - protein, 80 aa, synthetic construct
TTFKEAVTFKDVAVFFTEEELGLLDPAQRKLYQDVMLENFTNLLSVGHQPFHPFHFLREEKFWMMETATQREGNSGGKTI

SEQ ID NO: 711 - protein, 80 aa, synthetic construct
GPLQFRDVAIEFSLEEWHCLDMAQRNLYRDVMLENYRNLVFLGIVVSKPDLITHLEQGKKPSTMQRHEMVANPSVLCSHF

SEQ ID NO: 712 - protein, 80 aa, synthetic construct
NKSQGSVSFTDVTVDFTQEEWEQLDPSQRILYMDVMLENYSNLLSVEVWKADDQMERDHRNPDEQARQFLILKNQTPIEE

SEQ ID NO: 713 - protein, 80 aa, synthetic construct
EEEEMNDGSQMVRSQESLTFQDVAVDFTREEWDQLYPAQKNLYRDVMLENYRNLVALGYQLCKPEVIAQLELEEEWVIER

SEQ ID NO: 714 - protein, 80 aa, synthetic construct
EEATKKSKEKEPGMALPQGRLTFRDVAIEFSLEEWKCLNPAQRALYRAVMLENYRNLEFVDSSLKSMMEFSSTRHSITGE

SEQ ID NO: 715 - protein, 80 aa, synthetic construct
EKTPAGRIVADCLTDCYQDSVTFDDVAVDFTQEEWTLLDSTQRSLYSDVMLENYKNLATVGGQIIKPSLISWLEQEESRT

SEQ ID NO: 716 - protein, 80 aa, synthetic construct
AMSQESLTFKDVFVDFTLEEWQQLDSAQKNLYRDVMLENYSHLVSVGHLVGKPDVIFRLGPGDESWMADGGTPVRTCAGE

SEQ ID NO: 717 - protein, 80 aa, synthetic construct
DSVAFEDVAVNFTLEEWALLDPSQKNLYRDVMRETFRNLASVGKQWEDQNIEDPFKIPRRNISHIPERLCESKEGGQGEE

SEQ ID NO: 718 - protein, 80 aa, synthetic construct
MFQDSVAFEDVAVSFTQEEWALLDPSQKNLYRDVMQETFKNLTSVGKTWKVQNIEDEYKNPRRNLSLMREKLCESKESHH

SEQ ID NO: 719 - protein, 80 aa, synthetic construct
AVVATLRLSAQGTVTFEDVAVKFTQEEWNLLSEAQRCLYRDVTLENLALMSSLGCWCGVEDEAAPSKQSIYIQRETQVRT

SEQ ID NO: 720 - protein, 80 aa, synthetic construct
EEEEEDEDEDDLLTAGCQELVTFEDVAVYFSLEEWERLEADQRGLYQEVMQENYGILVSLGYPIPKPDLIFRLEQGEEPW

SEQ ID NO: 721 - protein, 80 aa, synthetic construct
TKFQEMVTFKDVAVVFTREELGLLDLAQRKLYQDVMLENFRNLLSVGYQPFKLDVILQLGKEDKLRMMETEIQGDGCSGH

SEQ ID NO: 722 - protein, 80 aa, synthetic construct
EEAAQKRKGKEPGMALPQGRLTFRDVAIEFSLAEWKCLNPSQRALYREVMLENYRNLEAVDISSKCMMKEVLSTGQGNTE

SEQ ID NO: 723 - protein, 80 aa, synthetic construct
DTVVFEDVVVDFTLEEWALLNPAQRKLYRDVMLETFKHLASVDNEAQLKASGSISQQDTSGEKLSLKQKIEKFTRKNIWA

SEQ ID NO: 724 - protein, 80 aa, synthetic construct
TTFKEGLTFKDVAVVFTEEELGLLDPVQRNLYQDVMLENFRNLLSVGHHPFKHDVFLLEKEKKLDIMKTATQRKGKSADK

SEQ ID NO: 725 - protein, 80 aa, synthetic construct
SALQQEFWKIQTSNGIQMDLVTFDSVAVEFTQEEWTLLDPAQRNLYSDVMLENYKNLSSVGYQLFKPSLISWLEEEEELS

SEQ ID NO: 726 - protein, 80 aa, synthetic construct
DCVIFEEVAVNFTPEEWALLDHAQRSLYRDVMLETCRNLASLDCYIYVRTSGSSSQRDVFGNGISNDEEIVKFTGSDSWS

SEQ ID NO: 727 - protein, 80 aa, synthetic construct
ELLTFRDVTIEFSLEEWEFLNPAQQSLYRKVMLENYRNLVSLGLTVSKPELISRLEQRQEPWNVKRHETIAKPPAMSSHY

SEQ ID NO: 728 - protein, 80 aa, synthetic construct
IKTQESLTLEDVAVEFSWEEWQLLDTAQKNLYRDVMVENYNHLVSLGYQTSKPDVLSKLAHGQEPWTTDAKIQNKNCPGI

SEQ ID NO: 729 - protein, 80 aa, synthetic construct
PAHVPGEAGPRRTRESRPGAVSFADVAVYFSPEEWECLRPAQRALYRDVMRETFGHLGALGFSVPKPAFISWVEGEVEAW

SEQ ID NO: 730 - protein, 80 aa, synthetic construct
GCPGDQVTPTRSLTAQLQETMTFKDVEVTFSQDEWGWLDSAQRNLYRDVMLENYRNMASLVGPFTKPALISWLEAREPWG

SEQ ID NO: 731 - protein, 80 aa, synthetic construct
ARDLVMFRDVAVDFSQEEWECLNSYQRNLYRDVILENYSNLVSLAGCSISKPDVITLLEQGKEPWMVVRDEKRRWTLDLE

SEQ ID NO: 732 - protein, 80 aa, synthetic construct
TTLKEAVTFKDVAVVFTEEELRLLDLAQRKLYREVMLENFRNLLSVGHQSLHRDTFHFLKEEKFWMMETATQREGNLGGK

SEQ ID NO: 733 - protein, 80 aa, synthetic construct
SPPSPRSSMAAVALRDSAQGMTFEDVAIYFSQEEWELLDESQRFLYCDVMLENFAHVTSLGYCHGMENEAIASEQSVSIQ

SEQ ID NO: 734 - protein, 80 aa, synthetic construct
DEEAQKRKAKESGMALPQGRLTFMDVAIEFSQEEWKSLDPGQRALYRDVMLENYRNLVFLGICLPDLSIISMLKQRREPL

SEQ ID NO: 735 - protein, 80 aa, synthetic construct
ALTQGPLKFMDVAIEFSQEEWKCLDPAQRTLYRDVMLENYRNLVSLGICLPDLSVTSMLEQKRDPWTLQSEEKIANDPDG

SEQ ID NO: 736 - protein, 80 aa, synthetic construct
TMFKEAVTFKDVAVVFTEEELGLLDVSQRKLYRDVMLENFRNLLSVGHQLSHRDTFHFQREEKFWIMETATQREGNSGGK

SEQ ID NO: 737 - protein, 80 aa, synthetic construct
QGTVAFEDVAVNFSQEEWSLLSEVQRCLYHDVMLENWVLISSLGCWCGSEDEEAPSKKSISIQRVSQVSTPGAGVSPKKA

SEQ ID NO: 738 - protein, 80 aa, synthetic construct
AEAFGDSEEDGEDVFEVEKILDMKTEGGKVLYKVRWKGYTSDDDTWEPEIHLEDCKEVLLEFRKKIAENKAKAVRKDIQR

SEQ ID NO: 739 - protein, 80 aa, synthetic construct
VLQMQNSEHHGQSIKTQTDSISLEDVAVNFTLEEWALLDPGQRNIYRDVMRATFKNLACIGEKWKDQDIEDEHKNQGRNL

SEQ ID NO: 740 - protein, 80 aa, synthetic construct
AMALTDPAQVSVTFDDVAVTFTQEEWGQLDLAQRTLYQEVMLENCGLLVSLGCPVPRPELIYHLEHGQEPWTRKEDLSQG

SEQ ID NO: 741 - protein, 80 aa, synthetic construct
VHGSVTFRDVAIDFSQEEWECLQPDQRTLYRDVMLENYSHLISLGSSISKPDVITLLEQEKEPWIVVSKETSRWYPDLES

SEQ ID NO: 742 - protein, 80 aa, synthetic construct
DPVACEDVAVNFTQEEWALLDISQRKLYREVMLETFRNLTSIGKKWKDQNIEYEYQNPRRNFRSLIEGNVNEIKEDSHCG

SEQ ID NO: 743 - protein, 80 aa, synthetic construct
IKFQERVTFKDVAVVFTKEELALLDKAQINLYQDVMLENFRNLMLVRDGIKNNILNLQAKGLSYLSQEVLHCWQIWKQRI

SEQ ID NO: 744 - protein, 80 aa, synthetic construct
GPLTFRDVAIEFSLKEWQCLDTAQRNLYRNVMLENYRNLVFLGITVSKPDLITCLEQGKEAWSMKRHEIMVAKPTVMCSH

SEQ ID NO: 745 - protein, 80 aa, synthetic construct
TMSKEAVTFKDVAVVFTEEELGLLDLAQRKLYRDVMLENFRNLLSVGHQPFHRDTFHFLREEKFWMMDIATQREGNSGGK

SEQ ID NO: 746 - protein, 80 aa, synthetic construct
GPLEFRDVAIEFSLEEWHCLDTAQQNLYRDVMLENYRHLVFLGIVVTKPDLITCLEQGKKPFTVKRHEMIAKSPVMCFHF

SEQ ID NO: 747 - protein, 80 aa, synthetic construct
GHTEGGELVNELLKSWLKGLVTFEDVAVEFTQEEWALLDPAQRTLYRDVMLENCRNLASLGNQVDKPRLISQLEQEDKVM

SEQ ID NO: 748 - protein, 80 aa, synthetic construct
AEPASVTVTFDDVALYFSEQEWEILEKWQKQMYKQEMKTNYETLDSLGYAFSKPDLITWMEQGRMLLISEQGCLDKTRRT

SEQ ID NO: 749 - protein, 80 aa, synthetic construct
HSQASAISQDREEKIMSQEPLSFKDVAVVFTEEELELLDSTQRQLYQDVMQENFRNLLSVGERNPLGDKNGKDTEYIQDE

SEQ ID NO: 750 - protein, 80 aa, synthetic construct
GSLEEGRRATGLPAAQVQEPVTFKDVAVDFTQEEWGQLDLVQRTLYRDVMLETYGHLLSVGNQIAKPEVISLLEQGEEPW

SEQ ID NO: 751 - protein, 80 aa, synthetic construct
TTFKEAVTFKDVAVVFTEEELGLLDPAQRKLYRDVMLENFRNLLSVGHQPFHQDTCHFLREEKFWMMGTATQREGNSGGK

SEQ ID NO: 752 - protein, 80 aa, synthetic construct
AKLYEAVTFKDVAVIFTEEELGLLDPAQRKLYRDVMLENFRNLLSVGGKIQTEMETVPEAGTHEEFSCKQIWEQIASDLT

SEQ ID NO: 753 - protein, 80 aa, synthetic construct
RSDLFLPDSQTNEERKQYDSVAFEDVAVNFTQEEWALLGPSQKSLYRDVMWETIRNLDCIGMKWEDTNIEDQHRNPRRSL

SEQ ID NO: 754 - protein, 80 aa, synthetic construct
PGTPGSLEMGLLTFRDVAIEFSPEEWQCLDTAQQNLYRNVMLENYRNLAFLGIALSKPDLITYLEQGKEPWNMKQHEMVD

SEQ ID NO: 755 - protein, 80 aa, synthetic construct
TPGVRVSTDPEQVTFEDVVVGFSQEEWGQLKPAQRTLYRDVMLDTFRLLVSVGHWLPKPNVISLLEQEAELWAVESRLPQ

SEQ ID NO: 756 - protein, 80 aa, synthetic construct
EQTQAAGMVAGWLINCYQDAVTFDDVAVDFTQEEWTLLDPSQRDLYRDVMLENYENLASVEWRLKTKGPALRQDRSWFRA

SEQ ID NO: 757 - protein, 80 aa, synthetic construct
PSEANSIQSANATTKTSETNHTSRPRLKNVDRSTAQQLAVTVGNVTVIITDFKEKTRSSSTSSSTVTSSAGSEQQNQSSS

SEQ ID NO: 758 - protein, 80 aa, synthetic construct
ALTQGQLSFSDVAIEFSQEEWKCLDPGQKALYRDVMLENYRNLVSLGEDNVRPEACICSGICLPDLSVTSMLEQKRDPWT

SEQ ID NO: 759 - protein, 80 aa, synthetic construct
AAAAALRAPAQSSVTFEDVAVNFSLEEWSLLNEAQRCLYRDVMLETLTLISSLGCWHGGEDEAAPSKQSTCIHIYKDQGG

SEQ ID NO: 760 - protein, 80 aa, synthetic construct
AQGSVSFNDVTVDFTQEEWQHLDHAQKTLYMDVMLENYCHLISVGCHMTKPDVILKLERGEEPWTSFAGHTCLEENWKAE

SEQ ID NO: 761 - protein, 80 aa, synthetic construct
DPVAFKDVAVNFTQEEWALLDISQRKLYREVMLETFRNLTSLGKRWKDQNIEYEHQNPRRNFRSLIEEKVNEIKDDSHCG

SEQ ID NO: 762 - protein, 80 aa, synthetic construct
SKDLVTFGDVAVNFSQEEWEWLNPAQRNLYRKVMLENYRSLVSLGVSVSKPDVISLLEQGKEPWMVKKEGTRGPCPDWEY

SEQ ID NO: 763 - protein, 80 aa, synthetic construct
DSVAFEDVAINFTCEEWALLGPSQKSLYRDVMQETIRNLDCIGMIWQNHDIEEDQYKDLRRNLRCHMVERACEIKDNSQC

SEQ ID NO: 764 - protein, 80 aa, synthetic construct
GPLTFMDVAIEFCLEEWQCLDIAQQNLYRNVMLENYRNLVFLGIAVSKPDLITCLEQEKEPWEPMRRHEMVAKPPVMCSH

SEQ ID NO: 765 - protein, 80 aa, synthetic construct
QSNDIARGFERGLEPEKIIGATDSCGDLMFLMKWKDTDEADLVLAKEANVKCPQIVIAFYEERLTWHAYPEDAENKEKET

SEQ ID NO: 766 - protein, 80 aa, synthetic construct
ALPAKDSAWPWEEKPRYLGPVTFEDVAVLFTEAEWKRLSLEQRNLYKEVMLENLRNLVSLAESKPEVHTCPSCPLAFGSQ

SEQ ID NO: 767 - protein, 80 aa, synthetic construct
DAKSLTAWSRTLVTFKDVFVDFTREEWKLLDTAQQIVYRNVMLENYKNLVSLGYQLTKPDVILRLEKGEEPWLVEREIHQ

SEQ ID NO: 768 - protein, 80 aa, synthetic construct
DAVAFEDVAVNFTQEEWALLGPSQKNLYRYVMQETIRNLDCIRMIWEEQNTEDQYKNPRRNLRCHMVERFSESKDSSQCG

SEQ ID NO: 769 - protein, 80 aa, synthetic construct
EKTKVERMVEDYLASGYQDSVTFDDVAVDFTPEEWALLDTTEKYLYRDVMLENYMNLASVEWEIQPRTKRSSLQQGFLKN

SEQ ID NO: 770 - protein, 80 aa, synthetic construct
DSVAFEDVDVNFTQEEWALLDPSQKNLYRDVMWETMRNLASIGKKWKDQNIKDHYKHRGRNLRSHMLERLYQTKDGSQRG

SEQ ID NO: 771 - protein, 80 aa, synthetic construct
IESQEPVTFEDVAVDFTQEEWQQLNPAQKTLHRDVMLETYNHLVSVGCSGIKPDVIFKLEHGKDPWIIESELSRWIYPDR

SEQ ID NO: 772 - protein, 80 aa, synthetic construct
AVGLCKAMSQGLVTFRDVALDFSQEEWEWLKPSQKDLYRDVMLENYRNLVWLGLSISKPNMISLLEQGKEPWMVERKMSQ

SEQ ID NO: 773 - protein, 80 aa, synthetic construct
DKVEEEAMAPGLPTACSQEPVTFADVAVVFTPEEWVFLDSTQRSLYRDVMLENYRNLASVADQLCKPNALSYLEERGEQW

SEQ ID NO: 774 - protein, 80 aa, synthetic construct
TFEDVAVYFSQEEWGLLDTAQRALYRHVMLENFTLVTSLGLSTSRPRVVIQLERGEEPWVPSGKDMTLARNTYGRLNSGS

SEQ ID NO: 775 - protein, 80 aa, synthetic construct
AEPPRLPLTFEDVAIYFSEQEWQDLEAWQKELYKHVMRSNYETLVSLDDGLPKPELISWIEHGGEPFRKWRESQKSGNII

SEQ ID NO: 776 - protein, 80 aa, synthetic construct
DSVVFEDVAVNFTQEEWALLGPSQKKLYRDVMQETFVNLASIGENWEEKNIEDHKNQGRKLRSHMVERLCERKEGSQFGE

SEQ ID NO: 777 - protein, 80 aa, synthetic construct
AAAALRDPAQGCVTFEDVTIYFSQEEWVLLDEAQRLLYCDVMLENFALIASLGLISFRSHIVSQLEMGKEPWVPDSVDMT

SEQ ID NO: 778 - protein, 80 aa, synthetic construct
AAPALALVSFEDVVVTFTGEEWGHLDLAQRTLYQEVMLETCRLLVSLGHPVPKPELIYLLEHGQELWTVKRGLSQSTCAG

SEQ ID NO: 779 - protein, 80 aa, synthetic construct
IKSQESLTLEDVAVEFTWEEWQLLGPAQKDLYRDVMLENYSNLVSVGYQASKPDALFKLEQGEPWTVENEIHSQICPEIK

SEQ ID NO: 780 - protein, 80 aa, synthetic construct
GESLESRVTLGSLTAESQELLTFKDVSVDFTQEEWGQLAPAHRNLYREVMLENYGNLVSVGCQLSKPGVISQLEKGEEPW

SEQ ID NO: 781 - protein, 80 aa, synthetic construct
ASVALEDVAVNFTREEWALLGPCQKNLYKDVMQETIRNLDCVGMKWKDQNIEDQYRYPRKNLRCRMLERFVESKDGTQCG

SEQ ID NO: 782 - protein, 80 aa, synthetic construct
TESQGTVTFKDVAIDFTQEEWKRLDPAQRKLYRNVMLENYNNLITVGYPFTKPDVIFKLEQEEEPWVMEEEVLRRHWQGE

SEQ ID NO: 783 - protein, 80 aa, synthetic construct
DSVASEDVAVNFTLEEWALLDPSQKKLYRDVMRETFRNLACVGKKWEDQSIEDWYKNQGRILRNHMEEGLSESKEYDQCG

SEQ ID NO: 784 - protein, 80 aa, synthetic construct
EETQGELTSSCGSKTMANVSLAFRDVSIDLSQEEWECLDAVQRDLYKDVMLENYSNLVSLGYTIPKPDVITLLEQEKEPW

SEQ ID NO: 785 - protein, 80 aa, synthetic construct
AAILLTTRPKVPVSFEDVSVYFTKTEWKLLDLRQKVLYKRVMLENYSHLVSLGFSFSKPHLISQLERGEGPWVADIPRTW

SEQ ID NO: 786 - protein, 80 aa, synthetic construct
KDKVEKEKSEKETTSKKNSHKKTRPRLKNVDRSSAQHLEVTVGDLTVIITDFKEKTKSPPASSAASADQHSQSGSSSDNT

SEQ ID NO: 787 - protein, 80 aa, synthetic construct
GPLTFTDVAIKFSLEEWQFLDTAQQNLYRDVMLENYRNLVFLGVGVSKPDLITCLEQGKEPWNMKRHKMVAKPPVVCSHF

SEQ ID NO: 788 - protein, 80 aa, synthetic construct
RKPNPQAMAALFLSAPPQAEVTFEDVAVYLSREEWGRLGPAQRGLYRDVMLETYGNLVSLGVGPAGPKPGVISQLERGDE

SEQ ID NO: 789 - protein, 80 aa, synthetic construct
LSLSPILLYTCEMFQDPVAFKDVAVNFTQEEWALLDISQKNLYREVMLETFWNLTSIGKKWKDQNIEYEYQNPRRNFRSV

SEQ ID NO: 790 - protein, 80 aa, synthetic construct
AAGEPRSLLFFQKPVTFEDVAVNFTQEEWDCLDASQRVLYQDVMSETFKNLTSVARIFLHKPELITKLEQEEEQWRETRV

SEQ ID NO: 791 - protein, 80 aa, synthetic construct
AAMPLKAQYQEMVTFEDVAVHFTKTEWTGLSPAQRALYRSVMLENFGNLTALGYPVPKPALISLLERGDMAWGLEAQDDP

SEQ ID NO: 792 - protein, 80 aa, synthetic construct
ARVPLTFSDVAIDFSQEEWEYLNSDQRDLYRDVMLENYTNLVSLDFNFTTESNKLSSEKRNYEVNAYHQETWKRNKTFNL

SEQ ID NO: 793 - protein, 80 aa, synthetic construct
ASRLPTAWSCEPVTFEDVTLGFTPEEWGLLDLKQKSLYREVMLENYRNLVSVEHQLSKPDVVSQLEEAEDFWPVERGIPQ

SEQ ID NO: 794 - protein, 80 aa, synthetic construct
SKKKRDAADKPRGFARGLDPERIIGATDSSGELMFLMKWKDSDEADLVLAKEANMKCPQIVIAFYEERLTWHSCPEDEAQ

SEQ ID NO: 795 - protein, 80 aa, synthetic construct
AHKYVGLQYHGSVTFEDVAIAFSQQEWESLDSSQRGLYRDVMLENYRNLVSMGHSRSKPHVIALLEQWKEPEVTVRKDGR

SEQ ID NO: 796 - protein, 80 aa, synthetic construct
AAARLLPVPAGPQPLSFQAKLTFEDVAVLLSQDEWDRLCPAQRGLYRNVMMETYGNVVSLGLPGSKPDIISQLERGEDPW

SEQ ID NO: 797 - protein, 80 aa, synthetic construct
AVGLLKAMYQELVTFRDVAVDFSQEEWDCLDSSQRHLYSNVMLENYRILVSLGLCFSKPSVILLLEQGKAPWMVKRELTK

SEQ ID NO: 798 - protein, 80 aa, synthetic construct
GLLTFRDVAIEFSLEEWQCLDTAQRNLYKNVILENYRNLVFLGIAVSKQDLITCLEQEKEPLTVKRHEMVNEPPVMCSHF

SEQ ID NO: 799 - protein, 80 aa, synthetic construct
GLLAFRDVALEFSPEEWECLDPAQRSLYRDVMLENYRNLISLGEDSFNMQFLFHSLAMSKPELIICLEARKEPWNVNTEK

SEQ ID NO: 800 - protein, 80 aa, synthetic construct
NLTEGRVVFEDVAIYFSQEEWGHLDEAQRLLYRDVMLENLALLSSLGSWHGAEDEEAPSQQGFSVGVSEVTASKPCLSSQ

SEQ ID NO: 801 - protein, 80 aa, synthetic construct
GPAQHTSWPCGSAVPTLKSMVTFEDVAVYFSQEEWELLDAAQRHLYHSVMLENLELVTSLGSWHGVEGEGAHPKQNVSVE

SEQ ID NO: 802 - protein, 80 aa, synthetic construct
SGYPGAERNLLEYSYFEKGPLTFRDVVIEFSQEEWQCLDTAQQDLYRKVMLENFRNLVFLGIDVSKPDLITCLEQGKDPW

SEQ ID NO: 803 - protein, 80 aa, synthetic construct
ARKLVMFRDVAIDFSQEEWECLDSAQRDLYRDVMLENYSNLVSLDLPSRCASKDLSPEKNTYETELSQWEMSDRLENCDL

SEQ ID NO: 804 - protein, 80 aa, synthetic construct
GPLQFRDVAIEFSLEEWHCLDTAQRNLYRNVMLENYSNLVFLGITVSKPDLITCLEQGRKPLTMKRNEMIAKPSVMCSHF

SEQ ID NO: 805 - protein, 80 aa, synthetic construct
VAGWLTNYSQDSVTFEDVAVDFTQEEWTLLDQTQRNLYRDVMLENYKNLVAVDWESHINTKWSAPQQNFLQGKTSSVVEM

SEQ ID NO: 806 - protein, 80 aa, synthetic construct
AAAWMAPAQESVTFEDVAVTFTQEEWGQLDVTQRALYVEVMLETCGLLVALGDSTKPETVEPIPSHLALPEEVSLQEQLA

SEQ ID NO: 807 - protein, 80 aa, synthetic construct
VLEWLFISQEQPKITKSWGPLSFMDVFVDFTWEEWQLLDPAQKCLYRSVMLENYSNLVSLGYQHTKPDIIFKLEQGEELC

SEQ ID NO: 808 - protein, 80 aa, synthetic construct
AAAVLMDRVQSCVTFEDVFVYFSREEWELLEEAQRFLYRDVMLENFALVATLGFWCEAEHEAPSEQSVSVEGVSQVRTAE

SEQ ID NO: 809 - protein, 80 aa, synthetic construct
AGSQFPDFKHLGTFLVFEELVTFEDVLVDFSPEELSSLSAAQRNLYREVMLENYRNLVSLGHQFSKPDIISRLEEEESYA

SEQ ID NO: 810 - protein, 80 aa, synthetic construct
IQSQISFEDVAVDFTLEEWQLLNPTQKNLYRDVMLENYSNLVFLEVWLDNPKMWLRDNQDNLKSMERGHKYDVFGKIFNS

SEQ ID NO: 811 - protein, 80 aa, synthetic construct
DLVAFEDVAVNFTQEEWSLLDPSQKNLYREVMQETLRNLASIGEKWKDQNIEDQYKNPRNNLRSLLGERVDENTEENHCG

SEQ ID NO: 812 - protein, 80 aa, synthetic construct
KDEDIKLRVIGQDSSEIHFKVKMTTPLKKLKKSYCQRQGVPVNSLRFLFEGQRIADNHTPEELGMEEEDVIEVYQEQIGG

SEQ ID NO: 813 - protein, 80 aa, synthetic construct
DSVAFEDVAVNFTQEEWALLSPSQKNLYRDVTLETFRNLASVGIQWKDQDIENLYQNLGIKLRSLVERLCGRKEGNEHRE

SEQ ID NO: 814 - protein, 80 aa, synthetic construct
RNFWILRLPPGSKGEAPKVPVTFDDVAVYFSELEWGKLEDWQKELYKHVMRGNYETLVSLDYAISKPDILTRIERGEEPC

SEQ ID NO: 815 - protein, 80 aa, synthetic construct
AAAAPRRPTQQGTVTFEDVAVNFSQEEWCLLSEAQRCLYRDVMLENLALISSLGCWCGSKDEEAPCKQRISVQRESQSRT

SEQ ID NO: 816 - protein, 80 aa, synthetic construct
SGEDSGSFYSWQKAKREQGLVTFEDVAVDFTQEEWQYLNPPQRTLYRDVMLETYSNLVFVGQQVTKPNLILKLEVEECPA

SEQ ID NO: 817 - protein, 80 aa, synthetic construct
DSVAFEDVAVNFTQEEWALLGPSQKSLYRNVMQETIRNLDCIEMKWEDQNIGDQCQNAKRNLRSHTCEIKDDSQCGETFG

SEQ ID NO: 818 - protein, 80 aa, synthetic construct
AAGWLTTWSQNSVTFQEVAVDFSQEEWALLDPAQKNLYKDVMLENFRNLASVGYQLCRHSLISKVDQEQLKTDERGILQG

SEQ ID NO: 819 - protein, 80 aa, synthetic construct
ENPRNQLMALMLLTAQPQELVMFEEVSVCFTSEEWACLGPIQRALYWDVMLENYGNVTSLEWETMTENEEVTSKPSSSQR

SEQ ID NO: 820 - protein, 80 aa, synthetic construct
LETYNSLVSLQELVSFEEVAVHFTWEEWQDLDDAQRTLYRDVMLETYSSLVSLGHCITKPEMIFKLEQGAEPWIVEETPN

SEQ ID NO: 821 - protein, 80 aa, synthetic construct
RHFRRPEPCREPLASPIQDSVAFEDVAVNFTQEEWALLDSSQKNLYREVMQETCRNLASVGSQWKDQNIEDHFEKPGKDI

SEQ ID NO: 822 - protein, 80 aa, synthetic construct
AAAELTAPAQGIVTFEDVAVYFSWKEWGLLDEAQKCLYHDVMLENLTLTTSLGGSGAGDEEAPYQQSTSPQRVSQVRIPK

SEQ ID NO: 823 - protein, 80 aa, synthetic construct
AATFQLPGHQEMPLTFQDVAVYFSQAEGRQLGPQQRALYRDVMLENYGNVASLGFPVPKPELISQLEQGKELWVLNLLGA

SEQ ID NO: 824 - protein, 80 aa, synthetic construct
RSEAGEPPSSLQVKPETPASAAVAVAAAAAPTTTAEKPPAEAQDEPAESLSEFKPFFGNIIITDVTANCLTVTFKEYVTV

SEQ ID NO: 825 - protein, 80 aa, synthetic construct
HRTTRIKITELNPHLMCALCGGYFIDATTIVECLHSFCKTCIVRYLETNKYCPMCDVQVHKTRPLLSIRSDKTLQDIVYK

SEQ ID NO: 826 - protein, 80 aa, synthetic construct
ASQEFEVEAIVDKRQDKNGNTQYLVRWKGYDKQDDTWEPEQHLMNCEKCVHDFNRRQTEKQKKLTWTTTSRIFSNNARRR

SEQ ID NO: 827 - protein, 80 aa, synthetic construct
ASGDLYEVERIVDKRKNKKGKWEYLIRWKGYGSTEDTWEPEHHLLHCEEFIDEFNGLHMSKDKRIKSGKQSSTSKLLRDS

SEQ ID NO: 828 - protein, 80 aa, synthetic construct
TLIRKADLENHNKDGGFWTVIDGKVYDIKDFQTQSLTGNSILAQFAGEDPVVALEAALQFEDTRESMHAFCVGQYLEPDQ

SEQ ID NO: 829 - protein, 80 aa, synthetic construct
EKTKIGTMVEDHRSNSYQDSVTFDDVAVEFTPEEWALLDTTQKYLYRDVMLENYMNLASVDFFFCLTSEWEIQPRTKRSS

SEQ ID NO: 830 - protein, 80 aa, synthetic construct
AHELVMFRDVAIDVSQEEWECLNPAQRNLYKEVMLENYSNLVSLGLSVSKPAVISSLEQGKEPWMVVREETGRWCPGTWK

SEQ ID NO: 831 - protein, 80 aa, synthetic construct
AFEDVAVYFSQEEWGLLDTAQRALYRRVMLDNFALVASLGLSTSRPRVVIQLERGEEPWVPSGTDTTLSRTTYRRRNPGS

SEQ ID NO: 832 - protein, 80 aa, synthetic construct
AQLRRGHLTFRDVAIEFSQEEWKCLDPVQKALYRDVMLENYRNLVSLGICLPDLSIISMMKQRTEPWTVENEMKVAKNPD

SEQ ID NO: 833 - protein, 80 aa, synthetic construct
SDHSLGISRSKTPVDDPMSLLYNMNDCYSKLKELVPSIPQNKKVSKMEILQHVIDYILDLQIALDSHPTIVSLHHQRPGQ

SEQ ID NO: 834 - protein, 80 aa, synthetic construct
KDPNEPQKPVSAYALFFRDTQAAIKGQNPNATFGEVSKIVASMWDGLGEEQKQVYKKKTEAAKKEYLKQLAAYRASLVSK

SEQ ID NO: 835 - protein, 80 aa, synthetic construct
QEEKQEDAAICPVTVLPEEPVTFQDVAVDFSREEWGLLGPTQRTEYRDVMLETFGHLVSVGWETTLENKELAPNSDIPEE

SEQ ID NO: 836 - protein, 80 aa, synthetic construct
DASRLSGRDPSSWTVEDVMQFVREADPQLGPHADLFRKHEIDGKALLLLRSDMMMKYMGLKLGPALKLSYHIDRLKQGKF

SEQ ID NO: 837 - protein, 80 aa, synthetic construct
AVTFEDVTIIFTWEEWKFLDSSQKRLYREVMWENYTNVMSVENWNESYKSQEEKFRYLEYENFSYWQGWWNAGAQMYENQ

SEQ ID NO: 838 - protein, 80 aa, synthetic construct
ELSAIGEQVFAVESIRKKRVRKGKVEYLVKWKGWPPKYSTWEPEEHILDPRLVMAYEEKEERDRASGYRKRGPKPKRLLL

SEQ ID NO: 839 - protein, 80 aa, synthetic construct
GGAGARLPALLDEQQVNVLLYDMNGCYSRLKELVPTLPQNRKVSKVEILQHVIDYIRDLQLELNSESEVGTPGGRGLPVR

SEQ ID NO: 840 - protein, 80 aa, synthetic construct
VVMAASPGSLHSPQQLAEEATRKRELRLMKNREAAKECRRRKKEYVKCLESRVAVLEVQNKKLIEELETLKDICSPKTDY

SEQ ID NO: 841 - protein, 80 aa, synthetic construct
GGGPGGRPGREPRQRHTANARERDRTNSVNTAFTALRTLIPTEPADRKLSKIETLRLASSYISHLGNVLLAGEACGDGQP

SEQ ID NO: 842 - protein, 80 aa, synthetic construct
SGFGYSLPQQQPAAVARRNERERNRVKLVNLGFATLREHVPNGAANKKMSKVETLRSAVEYIRALQQLLDEHDAVSAAFQ

SEQ ID NO: 843 - protein, 80 aa, synthetic construct
APLPPRDPNGAGPEWREPGAVSFADVAVYFCREEWGCLRPAQRALYRDVMRETYGHLSALGIGGNKPALISWVEEEAELW

SEQ ID NO: 844 - protein, 80 aa, synthetic construct
KQGFSKDPSTWSVDEVIQFMKHTDPQISGPLADLFRQHEIDGKALFLLKSDVMMKYMGLKLGPALKLCYYIEKLKEGKYS

SEQ ID NO: 845 - protein, 80 aa, synthetic construct
SGGGSPQSYEELQTQRVMANVRERQRTQSLNEAFAALRKIIPTLPSDKLSKIQTLKLAARYIDFLYQVLQSDELDSKMAS

SEQ ID NO: 846 - protein, 80 aa, synthetic construct
IAPGVVMASSPALPTQPAEEAARKREVRLMKNREAARECRRKKKEYVKCLENRVAVLENQNKTLIEELKALKDLYCHKSD

SEQ ID NO: 847 - protein, 80 aa, synthetic construct
SRIPVSKSQPVTPEKHRARKRQAWLWEEDKNLRSGVRKYGEGNWSKILLHYKFNNRTSVMLKDRWRTMKKLKLISSDSED

SEQ ID NO: 848 - protein, 80 aa, synthetic construct
SLAIARGRGKGPAAEEPLSLLDDMNHCYSRLRELVPGVPRGTQLSQVEILQRVIDYILDLQVVLAEPAPGPPDGPHLPIQ

SEQ ID NO: 849 - protein, 80 aa, synthetic construct
GSGPPSSGGGLYRDMGAQGGRPSLIARIPVARILGDPEEESWSPSLTNLEKVVVTDVTSNFLTVTIKESNTDQGFFKEKR

SEQ ID NO: 850 - protein, 80 aa, synthetic construct
ELPAVGEHVFAVESIEKKRIRKGRVEYLVKWRGWSPKYNTWEPEENILDPRLLIAFQNRERQEQLMGYRKRGPKPKPLVV

SEQ ID NO: 851 - protein, 80 aa, synthetic construct
VDSSSNQLPSSKRMRTAFTSTQLLELEREFASNMYLSRLRRIEIATYLNLSEKQVKIWFQNRRVKHKKEGKGSNHRGGGG

SEQ ID NO: 852 - protein, 80 aa, synthetic construct
TPGGGGDAGKKRKRRVLFSKAQTYELERRFRQQRYLSAPEREHLASLIRLTPTQVKIWFQNHRYKMKRARAEKGMEVTPL

SEQ ID NO: 853 - protein, 80 aa, synthetic construct
QTVVMTSPVTLTSQTTKTDDPQLKREIRLMKNREAARECRRKKKEYVKCLENRVAVLENQNKTLIEELKTLKDLYSNKSV

SEQ ID NO: 854 - protein, 80 aa, synthetic construct
KGSPSAQSFEELQSQRILANVRERQRTQSLNEAFAALRKIIPTLPSDKLSKIQTLKLAARYIDFLYQVLQSDEMDNKMTS

SEQ ID NO: 855 - protein, 80 aa, synthetic construct
NLTEDYMVFEDVAIHFSQEEWGILNDVQRHLHSDVMLENFALLSSVGCWHGAKDEEAPSKQCVSVGVSQVTTLKPALSTQ

SEQ ID NO: 856 - protein, 80 aa, synthetic construct
KDPNEPQKPVSAYALFFRDTQAAIKGQNPNATFGEVSKIVASMWDSLGEEQKQVYKRKTEAAKKEYLKALAAYRASLVSK

SEQ ID NO: 857 - protein, 80 aa, synthetic construct
KDPNEPQKPVSAYALFFRDTQAAIKGQNPNATFGEVSKIVASMWDSLGEEQKQVYKRKTEAAKKEYLKALAAYKDNQECQ

SEQ ID NO: 858 - protein, 80 aa, synthetic construct
LDGSTWDFCSEDCKSKYLLWYCKAARCHACKRQGKLLETIHWRGQIRHFCNQQCLLRFYSQQNQPNLDTQSGPESLLNSQ

SEQ ID NO: 859 - protein, 80 aa, synthetic construct
ASVQASRRQWCYLCDLPKMPWAMVWDFSEAVCRGCVNFEGADRIELLIDAARQLKRSHVLPEGRSPGPPALKHPATKDLA

SEQ ID NO: 860 - protein, 80 aa, synthetic construct
MEGPQPENMQPRTRRTKFTLLQVEELESVFRHTQYPDVPTRRELAENLGVTEDKVRVWFKNKRARCRRHQRELMLANELR

SEQ ID NO: 861 - protein, 80 aa, synthetic construct
PKIMPKKPAEEGNDSEEVPEASGPQNDGKELCPPGKPTTSEKIHERSGPKRGEHAWTHRLRERKQLVIYEEISDPEEDDE

SEQ ID NO: 862 - protein, 80 aa, synthetic construct
SAAQVSSSRRQSCYLCDLPRMPWAMIWDFSEPVCRGCVNYEGADRIEFVIETARQLKRAHGCFQDGRSPGPPPPVGVKTV

SEQ ID NO: 863 - protein, 80 aa, synthetic construct
PGPPGSLEMGPLTFRDVAIEFSLEEWQCLDTAQRNLYRKVMFENYRNLVFLGIAVSKPHLITCLEQGKEPWNRKRQEMVA

SEQ ID NO: 864 - protein, 80 aa, synthetic construct
NKKKVEEVLEEEEEEYVVEKVLDRRVVKGKVEYLLKWKGFSDEDNTWEPEENLDCPDLIAEFLQSQKTAHETDKSEGGKR

SEQ ID NO: 865 - protein, 80 aa, synthetic construct
LANVVEKVRLLRLHPGMGLKGDLCERHGEKLKMFCKEDVLIMCEACSQSPEHEAHSVVPMEDVAWEYKWELHEALEHLKK

SEQ ID NO: 866 - protein, 80 aa, synthetic construct [sequence omitted]

SEQ ID NO: 867 - protein, 80 aa, synthetic construct
ENSDLLPVAQTEPSIWTVDDVWAFIHSLPGCQDIADEFRAQEIDGQALLLLKEDHLMSAMNIKLGPALKICARINSLKES

SEQ ID NO: 868 - protein, 80 aa, synthetic construct
AGPGGGSRSGSGRPAAANAARERSRVQTLRHAFLELQRTLPSVPPDTKLSKLDVLLLATTYIAHLTRSLQDDAEAPADAG

SEQ ID NO: 869 - protein, 80 aa, synthetic construct
QNGKSKKVEEAEPEEFVVEKVLDRRVVNGKVEYFLKWKGFTDADNTWEPEENLDCPELIEAFLNSQKAGKEKDGTKRKSL

SEQ ID NO: 870 - protein, 80 aa, synthetic construct
QHPPDACAFRRGRKKRIPYSKGQLRELEREYAANKFITKDKRRKISAATSLSERQITIWFQNRRVKEKKVLAKVKNSATP

SEQ ID NO: 871 - protein, 80 aa, synthetic construct
SMSPTTSSQILARKRRRGIIEKRRRDRINNSLSELRRLVPSAFEKQGSAKLEKAEILQMTVDHLKMLHTAGGKGYFDAHA

SEQ ID NO: 872 - protein, 80 aa, synthetic construct
LVGMGHHFLPSEPTKWNVEDVYEFIRSLPGCQEIAEEFRAQEIDGQALLLLKEDHLMSAMNIKLGPALKIYARISMLKDS

SEQ ID NO: 873 - protein, 80 aa, synthetic construct
PANEDAPQPGEHGSACEVSVSFEDVTVDFSREEWQQLDSTQRRLYQDVMLENYSHLLSVGFEVPKPEVIFKLEQGEGPWT

SEQ ID NO: 874 - protein, 80 aa, synthetic construct
GYSSTENLQLVLERRRVANAKERERIKNLNRGFARLKALVPFLPQSRKPSKVDILKGATEYIQVLSDLLEGAKDSKKQDP

SEQ ID NO: 875 - protein, 80 aa, synthetic construct
EEAPAPEDVTKWTVDDVCSFVGGLSGCGEYTRVFREQGIDGETLPLLTEEHLLTNMGLKLGPALKIRAQVARRLGRVFYV

SEQ ID NO: 876 - protein, 80 aa, synthetic construct
GGTLAHTPRRSLPSHHGKKMRMARCGHCRGCLRVQDCGSCVNCLDKPKFGGPNTKKQCCVYRKCDKIEARKMERLAKKGR

SEQ ID NO: 877 - protein, 80 aa, synthetic construct
LNSPTTTSQIMARKKRRGIIEKRRRDRINNSLSELRRLVPTAFEKQGSAKLEKAEILQMTVDHLKMLQATGGKGYFDAHA

SEQ ID NO: 878 - protein, 80 aa, synthetic construct
QPVKSELDEEEERRKRRREKNKVAAARCRNKKKERTEFLQRESERLELMNAELKTQIEELKQERQQLILMLNRHRPTCIV

SEQ ID NO: 879 - protein, 80 aa, synthetic construct
LQPEVSSYRRGRKKRVPYTKVQLKELEKEYAASKFITKEKRRRISATTNLSERQVTIWFQNRRVKEKKVVSKSKAPHLHS

SEQ ID NO: 880 - protein, 80 aa, synthetic construct
LPVPLDSAFEPAFLRKRNERERQRVRCVNEGYARLRDHLPRELADKRLSKVETLRAAIDYIKHLQELLERQAWGLEGAAG

SEQ ID NO: 881 - protein, 80 aa, synthetic construct
SPFLQRPLHKRKGGQVRFSNDQTIELEKKFETQKYLSPPERKRLAKMLQLSERQVKTWFQNRRAKWRRLKQENPQSNKKE

SEQ ID NO: 882 - protein, 80 aa, synthetic construct
IAIATGSLHCVCCTEDGEVYTWGDNDEGQLGDGTTNAIQRPRLVAALQGKKVNRVACGSAHTLAWSTSKPASAGKLPAQV

SEQ ID NO: 883 - protein, 80 aa, synthetic construct
GGSDASQVPNGKRMRTAFTSTQLLELEREFSSNMYLSRLRRIEIATYLNLSEKQVKIWFQNRRVKHKKEGKGTQRNSHAG

SEQ ID NO: 884 - protein, 80 aa, synthetic construct
RLDLPPGFMFKVQAQHDYTATDTDELQLKAGDVVLVIPFQNPEEQDEGWLMGVKESDWNQHKELEKCRGVFPENFTERVP

SEQ ID NO: 885 - protein, 80 aa, synthetic construct
GICKLPGRLRIQPALWSREDVLHWLRWAEQEYSLPCTAEHGFEMNGRALCILTKDDFRHRAPSSGDVLYELLQYIKTQRR

SEQ ID NO: 886 - protein, 80 aa, synthetic construct
PNYRGCEYSYGPAFTRKRNERERQRVKCVNEGYAQLRHHLPEEYLEKRLSKVETLRAAIKYINYLQSLLYPDKAETKNNP

SEQ ID NO: 887 - protein, 80 aa, synthetic construct
LHGINPVFLSSNPSRWSVEEVYEFIASLQGCQEIAEEFRSQEIDGQALLLLKEEHLMSAMNIKLGPALKICAKINVLKET

SEQ ID NO: 888 - protein, 80 aa, synthetic construct
QAGQQQGQQKQKRHRTRFTPAQLNELERSFAKTHYPDIFMREELALRIGLTESRVQVWFQNRRAKWKKRKKTTNVFRAPG

SEQ ID NO: 889 - protein, 80 aa, synthetic construct
AAAVAVAAASRRQSCYLCDLPRMPWAMIWDFTEPVCRGCVNYEGADRVEFVIETARQLKRAHGCFPEGRSPPGAAASAAA

SEQ ID NO: 890 - protein, 80 aa, synthetic construct
FSSQTPASIKEEEGSPEKERPPEAEYINSRCVLFTYFQGDISSVVDEHFSRALSQPSSYSPSCTSSKAPRSSGPWRDCSF

SEQ ID NO: 891 - protein, 80 aa, synthetic construct
DKAGGSSGQRTRKKRCPYTKYQIRELEREFFFSVYINKEKRLQLSRMLNLTDRQVKIWFQNRRMKEKKINRDRLQYYSAN

SEQ ID NO: 892 - protein, 80 aa, synthetic construct
GAPLSGLQGLPECTRCGHGIVGTIVKARDKLYHPECFMCSDCGLNLKQRGYFFLDERLYCESHAKARVKPPEGYDVVAVY

SEQ ID NO: 893 - protein, 80 aa, synthetic construct
RRPATAETGGGAAAVARRNERERNRVKLVNLGFQALRQHVPHGGASKKLSKVETLRSAVEYIRALQRLLAEHDAVRNALA

SEQ ID NO: 894 - protein, 80 aa, synthetic construct
TVQVTGKTRTKEKYRVVYTDHQRLELEKEFHCNRYITIQRKSELAVNLGLSERQVKIWFQNRRAKERKMIKKKISQFENS

SEQ ID NO: 895 - protein, 80 aa, synthetic construct
EEAAQKRKEKEPGMALPQGHLTFRDVAIEFSLEEWKCLDPTQRALYRAMMLENYRNLHSVDISSKCMMKKFSSTAQGNTE

SEQ ID NO: 896 - protein, 80 aa, synthetic construct
DIRASQVARWTVDEVAEFVQSLLGCEEHAKCFKKEQIDGKAFLLLTQTDIVKVMKIKLGPALKIYNSILMFRHSQELPEE

SEQ ID NO: 897 - protein, 80 aa, synthetic construct
LSPLEGTKMTVNNLHPRVTEEDIVELFCVCGALKRARLVHPGVAEVVFVKKDDAITAYKKYNNRCLDGQPMKCNLHMNGN

SEQ ID NO: 898 - protein, 80 aa, synthetic construct
DNAERPRARRRRKPRVLFSQAQVYELERRFKQQRYLSAPERDQLASVLKLTSTQVKIWFQNRRYKCKRQRQDQTLELVGL

SEQ ID NO: 899 - protein, 80 aa, synthetic construct
SQVKSKAKKTVDKHSDEYKIRRERNNIAVRKSRDKAKMRNLETQHKVLELTAENERLQKKVEQLSRELSTLRNLFKQLPE

SEQ ID NO: 900 - protein, 80 aa, synthetic construct
KRDYIRLYGIKCAKCSIGFSKNDFVMRARSKVYHIECFRCVACSRQLIPGDEFALREDGLFCRADHDVVERASLGAGDPL

SEQ ID NO: 901 - protein, 80 aa, synthetic construct
SLGSQVKTRTKDKYRVVYTDHQRLELEKEFHYSRYITIRRKAELAATLGLSERQVKIWFQNRRAKERKINKKKLQQQQQQ

SEQ ID NO: 902 - protein, 80 aa, synthetic construct
QGGQRGRPHSRRRHRTTFSPVQLEQLESAFGRNQYPDIWARESLARDTGLSEARIQVWFQNRRAKQRKQERSLLQPLAHL

SEQ ID NO: 903 - protein, 80 aa, synthetic construct
DALTYLDQVKIRFGSDPATYNGFLEIMKEFKSQSIDTPGVIRRVSQLFHEHPDLIVGFNAFLPLGYRIDIPKNGKLNIQS

SEQ ID NO: 904 - protein, 80 aa, synthetic construct
RLHLDSNPLKWSVADVVRFIRSTDCAPLARIFLDQEIDGQALLLLTLPTVQECMDLKLGPAIKLCHHIERIKFAFYEQFA

SEQ ID NO: 905 - protein, 80 aa, synthetic construct
AKGAAPNAPRTRKKRCPYSKFQIRELEREFFFNVYINKEKRLQLSRMLNLTDRQVKIWFQNRRMKEKKLSRDRLQYFSGN

SEQ ID NO: 906 - protein, 80 aa, synthetic construct
TTGNWLTAKSGRKKRCPYTKHQTLELEKEFLFNMYLTRERRLEISKTINLTDRQVKIWFQNRRMKLKKMNRENRIRELTS

SEQ ID NO: 907 - protein, 80 aa, synthetic construct
YLVSNVIELLDVDPNDQEEDGANIDLDSQRKGKCAVIKTSTRQTYFLPVIGLVDAEKLKPGDLVGVNKDSYLILETLPTE

SEQ ID NO: 908 - protein, 80 aa, synthetic construct
KASPTLGKRKKRRHRTVFTAHQLEELEKAFSEAHYPDVYAREMLAVKTELPEDRIQVWFQNRRAKWRKREKRWGGSSVMA

SEQ ID NO: 909 - protein, 80 aa, synthetic construct
EESERPKPRSRRKPRVLFSQAQVFELERRFKQQRYLSAPEREHLASSLKLTSTQVKIWFQNRRYKCKRQRQDKSLELGAH

SEQ ID NO: 910 - protein, 80 aa, synthetic construct
VVPGSRQEEVIDHKLTEREWAEEWKHLNNLLNCIMDMVEKTRRSLTVLRRCQEADREELNHWARRYSDAEDTKKGPAPAA

SEQ ID NO: 911 - protein, 80 aa, synthetic construct
ESPEKKPACRKKKTRTVFSRSQVFQLESTFDMKRYLSSSERAGLAASLHLTETQVKIWFQNRRNKWKRQLAAELEAANLS

SEQ ID NO: 912 - protein, 80 aa, synthetic construct
RGGVGVGGGRKKKTRTVFSRSQVFQLESTFDLKRYLSSAERAGLAASLQLTETQVKIWFQNRRNKWKRQLAAELEAASLS

SEQ ID NO: 913 - protein, 80 aa, synthetic construct
ELLAHGRQKILDLLNEGSARDLRSLQRIGPKKAQLIVGWRELHGPFSQVEDLERVEGITGKQMESFLKANILGLAAGQRC

SEQ ID NO: 914 - protein, 80 aa, synthetic construct
ESPYGETISPEDAPESISKAVASLPPEQMFELMKQMKLCVQNSPQEARNMLLQNPQLAYALLQAQVVMRIVDPEIALKIL

SEQ ID NO: 915 - protein, 80 aa, synthetic construct
AGPLHKGKKAVNKDSLEYRLRRERNNIAVRKSRDKAKRRILETQQKVLEYMAENERLRSRVEQLTQELDTLRNLFRQIPE

SEQ ID NO: 916 - protein, 80 aa, synthetic construct
IRIVNGKPKKVRKPRTIYSSFQLAALQRRFQKTQYLALPERAELAASLGLTQTQVKIWFQNRRSKFKKMWKSGEIPSEQH

SEQ ID NO: 917 - protein, 80 aa, synthetic construct
TVYQFCSPSCWTKFQRTSPEGGIHLSCHYCHSLFSGKPEVLDWQDQVFQFCCRDCCEDFKRLRGVVSQCEHCRQEKLLHE

SEQ ID NO: 918 - protein, 80 aa, synthetic construct
TMVDTEMPFWPTNFGISSVDLSVMEDHSHSFDIKPFTTVDFSSISTPHYEDIPFTRTDPVVADYKYDLKLQEYQSAIKVE

SEQ ID NO: 919 - protein, 80 aa, synthetic construct
GRHHAELLKPRCSACDEIIFADECTEAEGRHWHMKHFCCLECETVLGGQRYIMKDGRPFCCGCFESLYAEYCETCGEHIG

SEQ ID NO: 920 - protein, 80 aa, synthetic construct
DPDKESPGCKRRRTRTNFTGWQLEELEKAFNESHYPDVFMREALALRLDLVESRVQVWFQNRRAKWRKKENTKKGPGRPA

SEQ ID NO: 921 - protein, 80 aa, synthetic construct
TEQPTPRQKKPRRSRTIFTELQLMGLEKKFQKQKYLSTPDRLDLAQSLGLTQLQVKTWYQNRRMKWKKMVLKGGQEAPTK

SEQ ID NO: 922 - protein, 80 aa, synthetic construct
SMELAKNKSKKRRNRTTFSTFQLEELEKVFQKTHYPDVYAREQLALRTDLTEARVQVWFQNRRAKWRKRERYGKIQEGRN

SEQ ID NO: 923 - protein, 80 aa, synthetic construct
GGGGGAGPVVVVRQRQAANARERDRTQSVNTAFTALRTLIPTEPVDRKLSKIETVRLASSYIAHLANVLLLGDSADDGQP

SEQ ID NO: 924 - protein, 80 aa, synthetic construct
IDDTVEGITGNLFEVYLKPYFLEAYRPIRKGDIFLVRGGMRAVEFKVVETDPSPYCIVAPDTVIHCEGEPIKREDEEESL

SEQ ID NO: 925 - protein, 80 aa, synthetic construct
SALNQTKKRKKRRHRTIFTSYQLEELEKAFNEAHYPDVYAREMLAMKTELPEDRIQVWFQNRRAKWRKREKCWGRSSVMA

SEQ ID NO: 926 - protein, 80 aa, synthetic construct
DGLPWGAAPGRARKKRKPYTKQQIAELENEFLVNEFINRQKRKELSNRLNLSDQQVKIWFQNRRMKKKRVVLREQALALY

SEQ ID NO: 927 - protein, 80 aa, synthetic construct
GGGGSGKTRTKDKYRVVYTDHQRLELEKEFHYSRYITIRRKSELAANLGLTERQVKIWFQNRRAKERKVNKKKQQQQQPP

SEQ ID NO: 928 - protein, 80 aa, synthetic construct
TRAGGLALGRSEASPENAARERSRVRTLRQAFLALQAALPAVPPDTKLSKLDVLVLAASYIAHLTRTLGHELPGPAWPPF

SEQ ID NO: 929 - protein, 80 aa, synthetic construct
KCDSNVSSSKKRRHRTTFTSLQLEELEKVFQKTHYPDVYVREQLALRTELTEARVQVWFQNRRAKWRKRERYGQIQQAKS

SEQ ID NO: 930 - protein, 80 aa, synthetic construct
NAANWLTAKSGRKKRCPYTKHQTLELEKEFLFNMYLTRERRLEISRSVHLTDRQVKIWFQNRRMKLKKMNRENRIRELTA

SEQ ID NO: 931 - protein, 80 aa, synthetic construct
LSEEEQPKKKHRRNRTTFTTYQLHELERAFEKSHYPDVYSREELAGKVNLPEVRVQVWFQNRRAKWRRQEKLEVSSMKLQ

SEQ ID NO: 932 - protein, 80 aa, synthetic construct
HMAGLAEYPMQGELASAISSGKKKRKRCGMCAPCRRRINCEQCSSCRNRKTGHQICKFRKCEELKKKPSAALEKVMLPTG

SEQ ID NO: 933 - protein, 80 aa, synthetic construct
SITKHPSTWSVEAVVLFLKQTDPLALCPLVDLFRSHEIDGKALLLLTSDVLLKHLGVKLGTAVKLCYYIDRLKQGKCFEN

SEQ ID NO: 934 - protein, 80 aa, synthetic construct
ACRRKREFIPDEKKDAMYWEKRRKNNEAAKRSREKRRLNDLVLENKLIALGEENATLKAELLSLKLKFGLISSTAYAQEI

SEQ ID NO: 935 - protein, 80 aa, synthetic construct
EIRFNGKGKKIRKPRTIYSSLQLQALNHRFQQTQYLALPERAELAASLGLTQTQVKIWFQNKRSKFKKLLKQGSNPHESD

SEQ ID NO: 936 - protein, 80 aa, synthetic construct
GLHGTRQEEMIDHRLTDREWAEEWKHLDHLLNCIMDMVEKTRRSLTVLRRCQEADREELNYWIRRYSDAEDLKKGGGSSS

SEQ ID NO: 937 - protein, 80 aa, synthetic construct
ELSAVGERVFAAEALLKRRIRKGRMEYLVKWKGWSQKYSTWEPEENILDARLLAAFEEREREMELYGPKKRGPKPKTFLL

SEQ ID NO: 938 - protein, 80 aa, synthetic construct
AREKSAGKRGPDRGSPEYRQRRERNNIAVRKSRDKAKRRNQEMQQKLVELSAENEKLHQRVEQLTRDLAGLRQFFKQLPS

SEQ ID NO: 939 - protein, 80 aa, synthetic construct
SGGCDNLIKLWKEEEDGQWKEEQKLEAHSDWVRDVAWAPSIGLPTSTIASCSQDGRVFIWTCDDASSNTWSPKLLHKFND

SEQ ID NO: 940 - protein, 80 aa, synthetic construct
VKGVDLDAPGSINGVPLLEVDLDSFEDKPWRKPGADLSDYFNYGFNEDTWKAYCEKQKRIRMGLEVIPVTSTTNKITAED

SEQ ID NO: 941 - protein, 80 aa, synthetic construct
KADSESNKGKKRRNRTTFTSYQLEELEKVFQKTHYPDVYAREQLAMRTDLTEARVQVWFQNRRAKWRKRERFGQMQQVRT

SEQ ID NO: 942 - protein, 80 aa, synthetic construct
TAKQREAEATAKRPRTTITAKQLETLKSAYNTSPKPARHVREQLSSETGLDMRVVQVWFQNRRAKEKRLKKDAGRQRWGQ

SEQ ID NO: 943 - protein, 80 aa, synthetic construct
GRHHAECLKPRCAACDEIIFADECTEAEGRHWHMKHFCCFECETVLGGQRYIMKEGRPYCCHCFESLYAEYCDTCAQHIG

SEQ ID NO: 944 - protein, 80 aa, synthetic construct
IIGGDRPDEFLQVKNVLKDGPAAQDGKIAPGDVIVDINGNCVLGHTHADVVQMFQLVPVNQYVNLTLCRGYPLPDDSEDP

SEQ ID NO: 945 - protein, 80 aa, synthetic construct
CCPECDTRVTSQCLDQNGHKLYRSGDNWTHSCQQCRCLEGEVDCWPLTCPNLSCEYTAILEGECCPRCVSDPCLADNITY

SEQ ID NO: 946 - protein, 80 aa, synthetic construct
LNSEEKKKRKQRRNRTTFNSSQLQALERVFERTHYPDAFVREDLARRVNLTEARVQVWFQNRRAKFRRNERAMLANKNAS

SEQ ID NO: 947 - protein, 80 aa, synthetic construct
GLNGGYQDELVDHRLTEREWADEWKHLDHALNCIMEMVEKTRRSMAVLRRCQESDREELNYWKRRYNENTELRKTGTELV

SEQ ID NO: 948 - protein, 80 aa, synthetic construct
GPGEEAPKKKHRRNRTTFTTYQLHQLERAFEASHYPDVYSREELAAKVHLPEVRVQVWFQNRRAKWRRQERLESGSGAVA

SEQ ID NO: 949 - protein, 80 aa, synthetic construct
VRMVNGKPKKVRKPRTIYSSYQLAALQRRFQKAQYLALPERAELAAQLGLTQTQVKIWFQNRRSKFKKLYKNGEVPLEHS

SEQ ID NO: 950 - protein, 80 aa, synthetic construct
EVRFNGKGKKIRKPRTIYSSLQLQALNRRFQQTQYLALPERAELAASLGLTQTQVKIWFQNKRSKFKKLMKQGGAALEGS

SEQ ID NO: 951 - protein, 80 aa, synthetic construct
GRSEQPKARQRRKPRVLFSQAQVLALERRFKQQRYLSAPEREHLASALQLTSTQVKIWFQNRRYKCKRQRQDKSLELAGH

SEQ ID NO: 952 - protein, 80 aa, synthetic construct
LPRTLGELQLYRILQKANLLSYFDAFIQQGGDDVQQLCEAGEEEFLEIMALVGMASKPLHVRRLQKALRDWVTNPGLFNQ

SEQ ID NO: 953 - protein, 80 aa, synthetic construct
NLSLDEDIQKWTVDDVHSFIRSLPGCSDYAQVFKDHAIDGETLPLLTEEHLRGTMGLKLGPALKIQSQVSQHVGSMFYKK

SEQ ID NO: 954 - protein, 80 aa, synthetic construct
SPEDGSLKKKQRRQRTHFTSQQLQELEATFQRNRYPDMSTREEIAVWTNLTEARVRVWFKNRRAKWRKRERSQQAELCKG

SEQ ID NO: 955 - protein, 80 aa, synthetic construct
SNLLVSASDDKTLKIWDVSSGKCLKTLKGHSNYVFCCNFNPQSNLIVSGSFDESVRIWDVKTGKCLKTLPAHSDPVSAVH

SEQ ID NO: 956 - protein, 80 aa, synthetic construct
GNYKSEVNSKPRKERTAFTKEQIRELEAEFAHHNYLTRLRRYEIAVNLDLTERQVKVWFQNRRMKWKRVKGGQQGAAARE

SEQ ID NO: 957 - protein, 80 aa, synthetic construct
LPRTLGELQLYRVLQRANLLSYYETFIQQGGDDVQQLCEAGEEEFLEIMALVGMATKPLHVRRLQKALREWATNPGLFSQ

SEQ ID NO: 958 - protein, 80 aa, synthetic construct
PEEPTIGDIYNGKVTSIMQFGCFVQLEGLRKRWEGLVHISELRREGRVANVADVVSKGQRVKVKVLSFTGTKTSLSMKDV

SEQ ID NO: 959 - protein, 80 aa, synthetic construct
YAFNHPFSINNLMSSEQQHHHSHHHHQPHKMDLKAYEQVMHYPGYGSPMPGSLAMGPVTNKTGLDASPLAADTSYYQGVY

SEQ ID NO: 960 - protein, 80 aa, synthetic construct
TAAAGPAPPTAPEPAGASSEPEAGDWRPEMSPCSNVVVTDVTSNLLTVTIKEFCNPEDFEKVAAGVAGAAGGGGSIGASK

SEQ ID NO: 961 - protein, 80 aa, synthetic construct
FLLHNALARKPKRIRTAFSPSQLLRLEHAFEKNHYVVGAERKQLAHSLSLTETQVKVWFQNRRTKFKRQKLEEEGSDSQQ

SEQ ID NO: 962 - protein, 80 aa, synthetic construct
KRIALYIGNLTWWTTDEDLTEAVHSLGVNDILEIKFFENRANGQSKGFALVGVGSEASSKKLMDLLPKRELHGQNPVVTP

SEQ ID NO: 963 - protein, 80 aa, synthetic construct
SGAPWYPINSRSRKKRKPYSKLQLAELEGEFLVNEFITRQRRRELSDRLNLSDQQVKIWFQNRRMKKKRLLLREQALSFF

SEQ ID NO: 964 - protein, 80 aa, synthetic construct
SDNLYPESITSRDCVQLGPPSEGELVELRWTDGNLYKAKFISSVTSHIYQVEFEDGSQLTVKRGDIFTLEEELPKRVRSR

SEQ ID NO: 965 - protein, 80 aa, synthetic construct
GIPASKVSKWSTDEVSEFIQSLPGCEEHGKVFKDEQIDGEAFLLMTQTDIVKIMSIKLGPALKIFNSILMFKAAEKNSHN

SEQ ID NO: 966 - protein, 80 aa, synthetic construct
EPSGLHEKRKQRRIRTTFTSAQLKELERVFAETHYPDIYTREELALKIDLTEARVQVWFQNRRAKFRKQERAASAKGAAG

SEQ ID NO: 967 - protein, 80 aa, synthetic construct
LLLHGPFARKPKRIRTAFSPSQLLRLERAFEKNHYVVGAERKQLAGSLSLSETQVKVWFQNRRTKYKRQKLEEEGPESEQ

SEQ ID NO: 968 - protein, 80 aa, synthetic construct
SSGNDDDLTIPRAAINKMIKETLPNVRVANDARELVVNCCTEFIHLISSEANEICNKSEKKTISPEHVIQALESLGFGSY

SEQ ID NO: 969 - protein, 80 aa, synthetic construct
ERRPQAPAKKLRKPRTIYSSLQLQHLNQRFQHTQYLALPERAQLAAQLGLTQTQVKIWFQNKRSKYKKLLKQNSGGQEGD

SEQ ID NO: 970 - protein, 80 aa, synthetic construct
NVQDRVKRPMNAFIVWSRDQRRKMALENPRMRNSEISKQLGYQWKMLTEAEKWPFFQEAQKLQAMHREKYPNYKYRPRRK

SEQ ID NO: 971 - protein, 80 aa, synthetic construct
EITRLAVWAAVQAVERKLEAQAMRLLTLEGRTGTNEKKIADCEKTAVEFANHLESKWVVLGTLLQEYGLLQRRLENMENL

SEQ ID NO: 972 - protein, 80 aa, synthetic construct
CEKDIDECSEGIIECHNHSRCVNLPGWYHCECRSGFHDDGTYSLSGESCIDIDECALRTHTCWNDSACINLAGGFDCLCP

SEQ ID NO: 973 - protein, 80 aa, synthetic construct
AAISLWTVVAAVQAIERKVEIHSRRLLHLEGRTGTAEKKLASCEKTVTELGNQLEGKWAVLGTLLQEYGLLQRRLENLEN

SEQ ID NO: 974 - protein, 80 aa, synthetic construct
GQNRPLIKPKRRLSAARRAGTSCANCQTTTTTLWRRNANGDPVCNACGLYYKLHNINRPLTMKKEGIQTRNRKMSSKSKK

SEQ ID NO: 975 - protein, 80 aa, synthetic construct
HAELPGKHCRRRKARTVFSDSQLSGLEKRFEIQRYLSTPERVELATALSLSETQVKTWFQNRRMKHKKQLRKSQDEPKAP

SEQ ID NO: 976 - protein, 80 aa, synthetic construct
QDATVYVGGLDEKVSEPLLWELFLQAGPVVNTHMPKDRVTGQHQGYGFVEFLSEEDADYAIKIMNMIKLYGKPIRVNKAS

SEQ ID NO: 977 - protein, 80 aa, synthetic construct
PIDNDAEGVWSPDIEQSFQEALAIYPPCGRRKIILSDEGKMYGRNELIARYIKLRTGKTRTRKQVSSHIQVLARRKSRDF

SEQ ID NO: 978 - protein, 80 aa, synthetic construct
GLDNDAEGVWSPDIEQSFQEALAIYPPCGRRKIILSDEGKMYGRNELIARYIKLRTGKTRTRKQVSSHIQVLARKKVREY

SEQ ID NO: 979 - protein, 80 aa, synthetic construct
DSVGTPQSNGGMRLHDFVSKTVIKPESCVPCGKRIKFGKLSLKCRDCRVVSHPECRDRCPLPCIPTLIGTPVKIGEGMLA

SEQ ID NO: 980 - protein, 80 aa, synthetic construct
SAPHSMTASSSSVSSPSPGLPRRSAPPSPLCRSLSPGTGGGVRGGVGYLSRGDPVRVLARRVRPDGSVQYLVEWGGGGIF

SEQ ID NO: 981 - protein, 80 aa, synthetic construct
GDPHYSFNHPFSINNLMSSSEQQHKLDFKAYEQALQYSPYGSTLPASLPLGSASVTTRSPIEPSALEPAYYQGVYSRPVL

SEQ ID NO: 982 - protein, 80 aa, synthetic construct
GQNRPLIKPKRRLSAARRAGTCCANCQTTTTTLWRRNANGDPVCNACGLYYKLHNVNRPLTMKKEGIQTRNRKMSNKSKK

SEQ ID NO: 983 - protein, 80 aa, synthetic construct
DSLSGSSLYSTSANLPVMGHEKFPSDLDLDMFNGSLECDMESIIRSELMDADGLDFNFDSLISTQNVVGLNVGNFTGAKQ

SEQ ID NO: 984 - protein, 80 aa, synthetic construct
TEISLWTVVAAIQAVEKKMESQAARLQSLEGRTGTAEKKLADCEKMAVEFGNQLEGKWAVLGTLLQEYGLLQRRLENVEN

SEQ ID NO: 985 - protein, 80 aa, synthetic construct
MDSGTRRKNATRETTSTLKAWLQEHRKNPYPTKGEKIMLAIITKMTLTQVSTWFANARRRLKKENKMTWPPRNKCADEKR

SEQ ID NO: 986 - protein, 80 aa, synthetic construct
NIEKQIYLPSTRAKTSIVWHFFHVDPQYTWRAICNLCEKSVSRGKPGSHLGTSTLQRHLQARHSPHWTRANKFGVASGEE

SEQ ID NO: 987 - protein, 80 aa, synthetic construct
AKQNDDSEAGAKRPRTTITAKQLETLKNAYKNSPKPARHVREQLSSETGLDMRVVQVWFQNRRAKEKRLKKDAGRHRWGQ

SEQ ID NO: 988 - protein, 80 aa, synthetic construct
DALSYLDQVKLQFGSQPQVYNDFLDIMKEFKSQSIDTPGVISRVSQLFKGHPDLIMGFNTFLPPGYKIEVQTNDMVNVTT

SEQ ID NO: 989 - protein, 80 aa, synthetic construct
DDHTVCLWDINAGPKEGKIVDAKAIFTGHSAVVEDVAWHLLHESLFGSVADDQKLMIWDTRSNTTSKPSHLVDAHTAEVN

SEQ ID NO: 990 - protein, 80 aa, synthetic construct
GSILLDKDGKRKHTRPTFSGQQIFALEKTFEQTKYLAGPERARLAYSLGMTESQVKVWFQNRRTKWRKKHAAEMATAKKK

SEQ ID NO: 991 - protein, 80 aa, synthetic construct
DPTALVEAIVEEVACPICMTFLREPMSIDCGHSFCHSCLSGLWEIPGESQNWGYTCPLCRAPVQPRNLRPNWQLANVVEK

SEQ ID NO: 992 - protein, 80 aa, synthetic construct
QSLPKKVSLSSDTTRKPLEIRSPSAESKKPKWVPPAASGGSRSSSSPLVVVSVKSPNQSLRLGLSRLARVKPLHPNATST

SEQ ID NO: 993 - protein, 80 aa, synthetic construct
AKSSQRKQRDCVNQCKSKPGLSTSIPLRMSSYTFKRPVTRITPHPGNEVRYHQWEESLEKPQQVCWQRRLQGLQAYSSAG

SEQ ID NO: 994 - protein, 80 aa, synthetic construct
VRMVNGKPKKVRKPRTIYSSFQLAALQRRFQKTQYLALPERAELAASLGLTQTQVKIWFQNKRSKIKKIMKNGEMPPEHS

SEQ ID NO: 995 - protein, 80 aa, synthetic construct
LQCNNHACGWDGGDCSLNFNDPWKNCTQSLQCWKYFSDGHCDSQCNSAGCLFDGFDCQRAEGQCNPLYDQYCKDHFSDGH

SEQ ID NO: 996 - protein, 80 aa, synthetic construct
ETWVEEDELFQVQAAPDEDSTTNITKKQKWTVEESEWVKAGVQKYGEGNWAAISKNYPFVNRTAVMIKDRWRTMKRLGMN

SEQ ID NO: 997 - protein, 80 aa, synthetic construct
AEISLWTVVAAIQAVERKVDAQASQLLNLEGRTGTAEKKLADCEKTAVEFGNHMESKWAVLGTLLQEYGLLQRRLENLEN

SEQ ID NO: 998 - protein, 80 aa, synthetic construct
LEKRTLFRLDLVPINRSVGLKAKPTKPVTEVLRPVVARYGLDLSGLLVRLSGEKEPLDLGAPISSLDGQRVVLEEKDPSR

SEQ ID NO: 999 - protein, 80 aa, synthetic construct
PNCLSSSMQLPHGGGRHQELVRFRDVAVVFSPEEWDHLTPEQRNLYKDVMLDNCKYLASLGNWTYKAHVMSSLKQGKEPW

SEQ ID NO: 1000 - protein, 80 aa, synthetic construct
DDYKEGDLRIMPESSESPPTEREPGGVVDGLIGKHVEYTKEDGSKRIGMVIHQVEAKPSVYFIKFDDDFHIYVYDLVKKS

SEQ ID NO: 1001 - protein, 80 aa, synthetic construct
SEPDLPLKRKQRRSRTTFTAEQLEELEKAFERTHYPDIYTREELAQRTKLTEARVQVWFSNRRARWRKQAGANQLAAFNH

SEQ ID NO: 1002 - protein, 80 aa, synthetic construct
AGGVLDKDGKKKHSRPTFSGQQIFALEKTFEQTKYLAGPERARLAYSLGMTESQVKVWFQNRRTKWRKRHAVEMASAKKK

SEQ ID NO: 1003 - protein, 80 aa, synthetic construct
DVMSFSVTVTTIPASQAMNPSSHGQTIPVQAFSEENSIEGTPSKCYCRLKAMIMCKGCGAFCHDDCIGPSKLCVSCLVVR

SEQ ID NO: 1004 - protein, 80 aa, synthetic construct
GGYSSVSSCNGYGRMGLLHQEKLPSDLDGMFIERLDCDMESIIRNDLMDGDTLDFNFDNVLPNQSFPHSVKTTTHSWVSG

SEQ ID NO: 1005 - protein, 80 aa, synthetic construct
GGSPTGFGCKSRPKARSSTGRECVNCGATSTPLWRRDGTGHYLCNACGLYHKMNGQNRPLIKPKRRLSAARRAGTSCANC

SEQ ID NO: 1006 - protein, 80 aa, synthetic construct
GQNRPLIRPKKRLIVSKRAGTQCTNCQTTTTTLWRRNASGDPVCNACGLYYKLHQVNRPLTMRKDGIQTRNRKASGKGKK

SEQ ID NO: 1007 - protein, 80 aa, synthetic construct
PVALLRKQNFQPTAQQQLTKPAKITCANCKKPLQKGQTAYQRKGSAHLFCSTTCLSSFSHKRTQNTRSIICKKDASTKKA

SEQ ID NO: 1008 - protein, 80 aa, synthetic construct
TEITLWTVVAAIQALEKKVDSCLTRLLTLEGRTGTAEKKLADCEKTAVEFGNQLEGKWAVLGTLLQEYGLLQRRLENVEN

SEQ ID NO: 1009 - protein, 80 aa, synthetic construct
KKQRGRPSSQPRRNIVGCRISHGWKEGDEPITQWKGTVLDQVPINPSLYLVKYDGIDCVYGLELHRDERVLSLKILSDRV

SEQ ID NO: 1010 - protein, 80 aa, synthetic construct
WTCDLDDDCGDRSDESASCAYPTCFPLTQFTCNNGRCININWRCDNDNDCGDNSDEAGCSHSCSSTQFKCNSGRCIPEHW

SEQ ID NO: 1011 - protein, 80 aa, synthetic construct
PKGAAAPSASQRRKRTSFSAEQLQLLELVFRRTRYPDIHLRERLAALTLLPESRIQVWFQNRRAKSRRQSGKSFQPLARP

SEQ ID NO: 1012 - protein, 80 aa, synthetic construct
KIKYDWYQTESQVVITLMIKNVQKNDVNVEFSEKELSALVKLPSGEDYNLKLELLHPIIPEQSTFKVLSTKIEIKLKKPE

SEQ ID NO: 1013 - protein, 80 aa, synthetic construct
DPSKEVEYVCELCKGAAPPDSPVVYSDRAGYNKQWHPTCFVCAKCSEPLVDLIYFWKDGAPWCGRHYCESLRPRCSGCDE

SEQ ID NO: 1014 - protein, 80 aa, synthetic construct
GSGAGKAKKSVDKNSNEYRVRRERNNIAVRKSRDKAKQRNVETQQKVLELTSDNDRLRKRVEQLSRELDTLRGIFRQLPE

SEQ ID NO: 1015 - protein, 80 aa, synthetic construct
GPASSFTPKQRSKARSCSEGRECVNCGATATPLWRRDGTGHYLCNACGLYHKMNGQNRPLIKPKRRLSAARRAGTCCANC

SEQ ID NO: 1016 - protein, 80 aa, synthetic construct
KPSDHIKRPMNAFMVWSRGQRRKMAQENPKMHNSEISKRLGAEWKLLSEAEKRPYIDEAKRLRAQHMKEHPDYKYRPRRK

SEQ ID NO: 1017 - protein, 80 aa, synthetic construct
LYSGFQQTADKCSVCGHLIMEMILQALGKSYHPGCFRCSVCNECLDGVPFTVDVENNIYCVRDYHTVFAPKCASCARPIL

SEQ ID NO: 1018 - protein, 80 aa, synthetic construct
HPSQDLVFSASPDATIRIWSVPNASCVQVVRAHESAVTGLSLHATGDYLLSSSDDQYWAFSDIQTGRVLTKVTDETSGCS

SEQ ID NO: 1019 - protein, 80 aa, synthetic construct
ELSAVGERVFAAESIIKRRIRKGRIEYLVKWKGWAIKYSTWEPEENILDSRLIAAFEQKERERELYGPKKRGPKPKTFLL

SEQ ID NO: 1020 - protein, 80 aa, synthetic construct
RTGSDSKSGKPRRARTAFTYEQLVALENKFKATRYLSVCERLNLALSLSLTETQVKIWFQNRRTKWKKQNPGADTSAPTG

SEQ ID NO: 1021 - protein, 80 aa, synthetic construct
VWDLSKIGEEQSPEDAEDGPPELLFIHGGHTAKISDFSWNPNEPWVICSVSEDNIMQVWQMAENIYNDEDPEGSVDPEGQ

SEQ ID NO: 1022 - protein, 80 aa, synthetic construct
ERCTPAGGGAEPRKLSRTPKCARCRNHGVVSCLKGHKRFCRWRDCQCANCLLVVERQRVMAAQVALRRQQATEDKKGLSG

SEQ ID NO: 1023 - protein, 80 aa, synthetic construct
SQPGALIPGDPQAMSQPNRGPSPFSPVQLHQLRAQILAYKMLARGQPLPETLQLAVQGKRTLPGLQQQQQQQQQQQQQQQ

SEQ ID NO: 1024 - protein, 573 aa, synthetic construct; identical to SEQ ID NO: 551

SEQ ID NO: 1025 - protein, 441 aa, synthetic construct
MSEREVSTAPAGTDMPAAKKQKLSSDENSNPDLSGDENDDAVSIESGTNTERPDTPTNTPNAPGRKSWGKGKWKSKKCKYSFKCVNSLKEDHNQPLFGVQFNWHSKEGDPLVFATVGSNRVTLYECHSQGEIRLLQSYVDADADENFYTCAWTYDSNTSHPLLAVAGSRGIIRIINPITMQCIKHYVGHGNAINELKFHPRDPNLLLSVSKDHALRLWNIQTDTLVAIFGGVEGHRDEVLSADYDLLGEKIMSCGMDHSLKLWRINSKRMMNAIKESYDYNPNKTNRPFISQKIHFPDFSTRDIHRNYVDCVRWLGDLILSKSCENAIVCWKPGKMEDDIDKIKPSESNVTILGRFDYSQCDIWYMRFSMDFWQKMLALGNQVGKLYVWDLEVEDPHKAKCTTLTHHKCGAAIRQTSFSRDSSILIAVCDDASIWRWDRLR

SEQ ID NO: 1026 - protein, 485 aa, synthetic construct
MPAMVEKGPEVSGKRRGRNNAAASASAAAASAAASAACASPAATAASGAAASSASAAAASAAAAPNNGQNKSLAAAAPNGNSSSNSWEEGSSGSSSDEEHGGGGMRVGPQYQAVVPDFDPAKLARRSQERDNLGMLVWSPNQNLSEAKLDEYIAIAKEKHGYNMEQALGMLFWHKHNIEKSLADLPNFTPFPDEWTVEDKVLFEQAFSFHGKTFHRIQQMLPDKSIASLVKFYYSWKKTRTKTSVMDRHARKQKREREESEDELEEANGNNPIDIEVDQNKESKKEVPPTETVPQVKKEKHSTQAKNRAKRKPPKGMFLSQEDVEAVSANATAATTVLRQLDMELVSVKRQIQNIKQTNSALKEKLDGGIEPYRLPEVIQKCNARWTTEEQLLAVQAIRKYGRDFQAISDVIGNKSVVQVKNFFVNYRRRFNIDEVLQEWEAEHGKEETNGPSNQKPVKSPDNSIKMPEEEDEAPVLDVRYASAS

SEQ ID NO: 1027 - protein, 1615 aa, Homo sapiens
MPARTAPARVPTLAVPAISLPDDVRRRLKDLERDSLTEKECVKEKLNLLHEFLQTEIKNQLCDLETKLRKEELSEEGYLAKVKSLLNKDLSLENGAHAYNREVNGRLENGNQARSEARRVGMADANSPPKPLSKPRTPRRSKSDGEAKPEPSPSPRITRKSTRQTTITSHFAKGPAKRKPQEESERAKSDESIKEEDKDQDEKRRRVTSRERVARPLPAEEPERAKSGTRTEKEEERDEKEEKRLRSQTKEPTPKQKLKEEPDREARAGVQADEDEDGDEKDEKKHRSQPKDLAAKRRPEEKEPEKVNPQISDEKDEDEKEEKRRKTTPKEPTEKKMARAKTVMNSKTHPPKCIQCGQYLDDPLKYGQHPPDAVDEPQMLTNEKLSIFDANESGFESYEALPQHKLTCFSVYCKHGHLCPIDTGLIEKNIELFFSGSAKPIYDDDPSLEGGVNGKNLGPINEWWITGFDGGEKALIGFSTSFAEYILMDPSPEYAPIFGLMQEKIYISKIVVEFLQSNSDSTYEDLINKIETTVPPSGLNLNRFTEDSLLRHAQFVVEQVESYDEAGDSDEQPIFLTPCMRDLIKLAGVTLGQRRAQARRQTIRHSTREKDRGPTKATTTKLVYQIFDTFFAEQIEKDDREDKENAFKRRRCGVCEVCQQPECGKCKACKDMVKFGGSGRSKQACQERRCPNMAMKEADDDEEVDDNIPEMPSPKKMHQGKKKKQNKNRISWVGEAVKTDGKKSYYKKVCIDAETLEVGDCVSVIPDDSSKPLYLARVTALWEDSSNGQMFHAHWFCAGTDTVLGATSDPLELFLVDECEDMQLSYIHSKVKVIYKAPSENWAMEGGMDPESLLEGDDGKTYFYQLWYDQDYARFESPPKTQPTEDNKFKFCVSCARLAEMRQKEIPRVLEQLEDLDSRVLYYSATKNGILYRVGDGVYLPPEAFTFNIKLSSPVKRPRKEPVDEDLYPEHYRKYSDYIKGSNLDAPEPYRIGRIKEIFCPKKSNGRPNETDIKIRVNKFYRPENTHKSTPASYHADINLLYWSDEEAVVDFKAVQGRCTVEYGEDLPECVQVYSMGGPNRFYFLEAYNAKSKSFEDPPNHARSPGNKGKGKGKGKGKPKSQACEPSEPEIEIKLPKLRTLDVFSGCGGLSEGFHQAGISDTLWAIEMWDPAAQAFRLNNPGSTVFTEDCNILLKLVMAGETTNSRGQRLPQKGDVEMLCGGPPCQGFSGMNRFNSRTYSKFKNSLVVSFLSYCDYYRPRFFLLENVRNFVSFKRSMVLKLTLRCLVRMGYQCTFGVLQAGQYGVAQTRRRAIILAAAPGEKLPLFPEPLHVFAPRACQLSVVVDDKKFVSNITRLSSGPFRTITVRDTMSDLPEVRNGASALEISYNGEPQSWFQRQLRGAQYQPILRDHICKDMSALVAARMRHIPLAPGSDWRDLPNIEVRLSDGTMARKLRYTHHDRKNGRSSSGALRGVCSCVEAGKACDPAARQFNTLIPWCLPHTGNRHNHWAGLYGRLEWDGFFSTTVTNPEPMGKQGRVLHPEQHRVVSVRECARSQGFPDTYRLFGNILDKHRQVGNAVPPPLAKAIGLEIKLCMLAKARESASAKIKEEEAAKD

SEQ ID NO: 1028 - protein, 912 aa, Homo sapiens
MPAMPSSGPGDTSSSAAEREEDRKDGEEQEEPRGKEERQEPSTTARKVGRPGRKRKHPPVESGDTPKDPAVISKSPSMAQDSGASELLPNGDLEKRSEPQPEEGSPAGGQKGGAPAEGEGAAETLPEASRAVENGCCTPKEGRGAPAEAGKEQKETNIESMKMEGSRGRLRGGLGWESSLRQRPMPRLTFQAGDPYYISKRKRDEWLARWKREAEKKAKVIAGMNAVEENQGPGESQKVEEASPPAVQQPTDPASPTVATTPEPVGSDAGDKNATKAGDDEPEYEDGRGFGIGELVWGKLRGFSWWPGRIVSWWMTGRSRAAEGTRWVMWFGDGKFSVVCVEKLMPLSSFCSAFHQATYNKQPMYRKAIYEVLQVASSRAGKLFPVCHDSDESDTAKAVEVQNKPMIEWALGGFQPSGPKGLEPPEEEKNPYKEVYTDMWVEPEAAAYAPPPPAKKPRKSTAEKPKVKEIIDERTRERLVYEVRQKCRNIEDICISCGSLNVTLEHPLFVGGMCQNCKNCFLECAYQYDDDGYQSYCTICCGGREVLMCGNNNCCRCFCVECVDLLVGPGAAQAAIKEDPWNCYMCGHKGTYGLLRRREDWPSRLQMFFANNHDQEFDPPKVYPPVPAEKRKPIRVLSLFDGIATGLLVLKDLGIQVDRYIASEVCEDSITVGMVRHQGKIMYVGDVRSVTQKHIQEWGPFDLVIGGSPCNDLSIVNPARKGLYEGTGRLFFEFYRLLHDARPKEGDDRPFFWLFENVVAMGVSDKRDISRFLESNPVMIDAKEVSAAHRARYFWGNLPGMNRPLASTVNDKLELQECLEHGRIAKFSKVRTITTRSNSIKQGKDQHFPVFMNEKEDILWCTEMERVFGFPVHYTDVSNMSRLARQRLLGRSWSVPVIRHLFAPLKEYFACV

SEQ ID NO: 1029 - protein, 301 aa, Homo sapiens
NHDQEFDPPKVYPPVPAEKRKPIRVLSLFDGIATGLLVLKDLGIQVDRYIASEVCEDSITVGMVRHQGKIMYVGDVRSVTQKHIQEWGPFDLVIGGSPCNDLSIVNPARKGLYEGTGRLFFEFYRLLHDARPKEGDDRPFFWLFENVVAMGVSDKRDISRFLESNPVMIDAKEVSAAHRARYFWGNLPGMNRPLASTVNDKLELQECLEHGRIAKFSKVRTITTRSNSIKQGKDQHFPVFMNEKEDILWCTEMERVFGFPVHYTDVSNMSRLARQRLLGRSWSVPVIRHLFAPLKEYFACV

SEQ ID NO: 1030 - protein, 853 aa, Homo sapiens
MKGDTRHLNGEEDAGGREDSILVNGACSDQSSDSPPILEAIRTPEIRGRRSSSRLSKREVSSLLSYTQDLTGDGDGEDGDGSDTPVMPKLFRETRTRSESPAVRTRNNNSVSSRERHRPSPRSTRGRQGRNHVDESPVEFPATRSLRRRATASAGTPWPSPPSSYLTIDLTDDTEDTHGTPQSSSTPYARLAQDSQQGGMESPQVEADSGDGDSSEYQDGKEFGIGDLVWGKIKGFSWWPAMVVSWKATSKRQAMSGMRWVQWFGDGKFSEVSADKLVALGLFSQHFNLATFNKLVSYRKAMYHALEKARVRAGKTFPSSPGDSLEDQLKPMLEWAHGGFKPTGIEGLKPNNTQPVVNKSKVRRAGSRKLESRKYENKTRRRTADDSATSDYCPAPKRLKTNCYNNGKDRGDEDQSREQMASDVANNKSSLEDGCLSCGRKNPVSFHPLFEGGLCQTCRDRFLELFYMYDDDGYQSYCTVCCEGRELLLCSNTSCCRCFCVECLEVLVGTGTAAEAKLQEPWSCYMCLPQRCHGVLRRRKDWNVRLQAFFTSDTGLEYEAPKLYPAIPAARRRPIRVLSLFDGIATGYLVLKELGIKVGKYVASEVCEESIAVGTVKHEGNIKYVNDVRNITKKNIEEWGPFDLVIGGSPCNDLSNVNPARKGLYEGTGRLFFEFYHLLNYSRPKEGDDRPFFWMFENVVAMKVGDKRDISRFLECNPVMIDAIKVSAAHRARYFWGNLPGMNRPVIASKNDKLELQDCLEYNRIAKLKKVQTITTKSNSIKQGKNQLFPVVMNGKEDVLWCTELERIFGFPVHYTDVSNMGRGARQKLLGRSWSVPVIRHLFAPLKDYFACE

SEQ ID NO: 1031 - protein, 740 aa, Mus sp.
MRGGSRHLSNEEDVSGCEDCIIISGTCSDQSSDPKTVPLTQVLEAVCTVENRGCRTSSQPSKRKASSLISYVQDLTGDGDEDRDGEVGGSSGSGTPVMPQLFCETRIPSKTPAPLSWQANTSASTPWLSPASPYPIIDLTDEDVIPQSISTPSVDWSQDSHQEGMDTTQVDAESRDGGNIEYQVSADKLLLSQSCILAAFYKLVPYRESIYRTLEKARVRAGKACPSSPGESLEDQLKPMLEWAHGGFKPTGIEGLKPNKKQPENKSRRRTTNDPAASESSPPKRLKTNSYGGKDRGEDEESREQMASDVTNNKGNLEDHCLSCGRKDPVSFHPLFEGGLCQSCRDRFLELFYMYDEDGYQSYCTVCCEGRELLLCSNTSCCRCFCVECLEVLVGAGTAEDVKLQEPWSCYMCLPQRCHGVLRRRKDWNMRLQDFFTTDPDLEEFEPPKLYPAIPAAKRRPIRVLSLFDGIATGYLVLKELGIKVEKYIASEVCAESIAVGTVKHEGQIKYVDDIRNITKEHIDEWGPFDLVIGGSPCNDLSCVNPVRKGLFEGTGRLFFEFYRLLNYSCPEEEDDRPFFWMFENVVAMEVGDKRDISRFLECNPVMIDAIKVSAAHRARYFWGNLPGMNRPVMASKNDKLELQDCLEFSRTAKLKKVQTITTKSNSIRQGKNQLFPVVMNGKDDVLWCTELERIFGFPEHYTDVSNMGRGARQKLLGRSWSVPVIRHLFAPLKDHFACE

SEQ ID NO: 1032 - protein, 387 aa, Homo sapiens
MAAIPALDPEAEPSMDVILVGSSELSSSVSPGTGRDLIAYEVKANQRNIEDICICCGSLQVHTQHPLFEGGICAPCKDKFLDALFLYDDDGYQSYCSICCSGETLLICGNPDCTRCYCFECVDSLVGPGTSGKVHAMSNWVCYLCLPSSRSGLLQRRRKWRSQLKAFYDRESENPLEMFETVPVWRRQPVRVLSLFEDIKKELTSLGFLESGSDPGQLKHVVDVTDTVRKDVEEWGPFDLVYGATPPLGHTCDRPPSWYLFQFHRLLQYARPKPGSPRPFFWMFVDNLVLNKEDLDVASRFLEMEPVTIPDVHGGSLQNAVRVWSNIPAIRSSRHWALVSEEELSLLAQNKQSSKLAAKWPTKLVKNCFLPLREYFKYFSTELTSSL

SEQ ID NO: 1033 - protein, 213 aa, Homo sapiens
NPLEMFETVPVWRRQPVRVLSLFEDIKKELTSLGFLESGSDPGQLKHVVDVTDTVRKDVEEWGPFDLVYGATPPLGHTCDRPPSWYLFQFHRLLQYARPKPGSPRPFFWMFVDNLVLNKEDLDVASRFLEMEPVTIPDVHGGSLQNAVRVWSNIPAIRSRHWALVSEEELSLLAQNKQSSKLAAKWPTKLVKNCFLPLREYFKYFSTELTSSL

SEQ ID NO: 1034 - protein, 421 aa, Mus sp.
MGSRETPSSCSKTLETLDLETSDSSSPDADSPLEEQWLKSSPALKEDSVDVVLEDCKEPLSPSSPPTGREMIRYEVKVNRRSIEDICLCCGTLQVYTRHPLFEGGLCAPCKDKFLESLFLYDDDGHQSYCTICCSGGTLFICESPDCTRCYCFECVDILVGPGTSERINAMACWVCFLCLPFSRSGLLQRRKRWRHQLKAFHDQEGAGPMEIYKTVSAWKRQPVRVLSLFRNIDKVLKSLGFLESGSGSGGGTLKYVEDVTNVVRRDVEKWGPFDLVYGSTQPLGSSCDRCPGWYMFQFHRILQYALPRQESQRPFFWIFMDNLLLTEDDQETTTRFLQTEAVTLQDVRGRDYQNAMRVWSNIPGLKSKHAPLTPKEEEYLQAQVRSRSKLDAPKVDLLVKNCLLPLREYFKYFSQNSLPL

SEQ ID NO: 1035 - protein, 214 aa, Mus sp.
GPMEIYKTVSAWKRQPVRVLSLFRNIDKVLKSLGFLESGSGSGGGTLKYVEDVTNVVRRDVEKWGPFDLVYGSTQPLGSSCDRCPGWYMFQFHRILQYALPRQESQRPFFWIFMDNLLLTEDDQETTTRFLQTEAVTLQDVRGRDYQNAMRVWSNIPGLKSKHAPLTPKEEEYLQAQVRSRSKLDAPKVDLLVKNCLLPLREYFKYFSQNSLPL

SEQ ID NO: 1036 - protein, 391 aa, Homo sapiens
MEPLRVLELYSGVGGMHHALRESCIPAQVVAAIDVNTVANEVYKYNFPHTQLLAKTIEGITLEEFDRLSFDMILMSPPCQPFTRIGRQGDMTDSRTNSFLHILDILPRLQKLPKYILLENVKGFEVSSTRDLLIQTIENCGFQYQEFLLSPTSLGIPNSRLRYFLIAKLQSEPLPFQAPGQVLMEFPKIESVHPQKYAMDVENKIQEKNVEPNISFDGSIQCSGKDAILFKLETAEEIHRKNQQDSDLSVKMLKDFLEDDTDVNQYLLPPKSLLRYALLLDIVQPTCRRSVCFTKGYGSYIEGTGSVLQTAEDVQVENIYKSLTNLSQEEQITKLLILKLRYFTPKEIANLLGFPPEFGFPEKITVKQRYRLLGNSLNVHVVAKLIKILYE

SEQ ID NO: 1037 - protein, 395 aa, Mycoplasma penetrans
MNSNKDKIKVIKVFEAFAGIGSQFKALKNIARSKNWEIQHSGMVEWFVDAIVSYVAIHSKNFNPKIEQLDKDILSISNDSKMPISEYGIKKINNTIKASYLNYAKKHFNNLFDIKKVNKDNFPKNIDIFTYSFPCQDLSVQGLQKGIDKELNTRSGLLWEIERILEEIKNSFSKEEMPKYLLMENVKNLLSHKNKKNYNTWLKQLEKFGYKSKTYLLNSKNFDNCQNRERVFCLSIRDDYLEKTGFKFKELEKVKNPPKKIKDILVDSSNYKYLNLNKYETTTFRETKSNIISRSLKNYTTFNSENYVYNINGIGPTLTASGANSRIKIETQQGVRYLTPLECFKYMQFDVNDFKKVQSTNLISENKMIYIAGNSIPVKILEAIFNTLEFVNNEE

SEQ ID NO: 1038 - protein, 386 aa, Spiroplasma monobiae
MSKVENKTKKLRVFEAFAGIGAQRKALEKVRKDEYEIVGLAEWYVPAIVMYQAIHNNFHTKLEYKSVSREEMIDYLENKTLSWNSKNPVSNGYWKRKKDDELKIIYNAIKLSEKEGNIFDIRDLYKRTLKNIDLLTYSFPCQDLSQQGIQKGMKRGSGTRSGLLWEIERALDSTEKNDLPKYLLMENVGALLHKKNEEELNQWKQKLESLGYQNSIEVLNAADFGSSQARRRVFMISTLNEFVELPKGDKKPKSIKKVLNKIVSEKDILNNLLKYNLTEFKKTKSNINKASLIGYSKFNSEGYVYDPEFTGPTLTASGANSRIKIKDGSNIRKMNSDETFLYIGFDSQDGKRVNEIEFLTENQKIFVCGNSISVEVLEAIIDKIGG

SEQ ID NO: 1039 - protein, 358 aa, Haemophilus parainfluenzae
MKDVLDDNLLEEPAAQYSLFEPESNPNLREKFTFIDLFAGIGGFRIAMQNLGGKCIFSSEWDEQAQKTYEANFGDLPYGDITLEETKAFIPEKFDILCAGFPCQAFSIAGKRGGFEDTRGTLFFDVAEIIRRHQPKAFFLENVKGLKNHDKGRTLKTILNVLREDLGYFVPEPAIVNAKNFGVPQNRERIYIVGFHKSTGVNSFSYPEPLDKIVTFADIREEKTVPTKYYLSTQYIDTLRKHKERHESKGNGFGYEIIPDDGIANAIVVGGMGRERNLVIDHRITDFTPTTNIKGEVNREGIRKMTPREWARLQGFPDSYVIPVSDASAYKQFGNSVAVPAIQATGKKILEKLGNLYD

SEQ ID NO: 1040 - protein, 521 aa, Arthrobacter luteus
MSKANAKYSFVDLFAGIGGFHAALAATGGVCEYAVEIDREAAAVYERNWNKPALGDITDDANDEGVTLRGYDGPIDVLTGGFPCQPFSKSGAQHGMAETRGTLFWNIARIIEEREPTVLILENVRNLVGPRHRHEWLTIIETLRFFGYEVSGAPAIFSPHLLPAWMGGTPQVRERVFITATLVPERMRDERIPRTETGEIDAEAIGPKPVATMNDRFPIKKGGTELFHPGDRKSGWNLLTSGIIREGDPEPSNVDLRLTETETLWIDAWDDLESTIRRATGRPLEGFPYWADSWTDFRELSRLVVIRGFQAPEREVVGDRKRYVARTDMPEGFVPASVTRPAIDETLPAWKQSHLRRNYDFFERHFAEVVAWAYRWGVYTDLFPASRRKLEWQAQDAPRLWDTVMHFRPSGIRAKRPTYLPALVAITQTSIVGPLERRLSPRETARLQGLPEWFDFGEQRAAATYKQMGNGVNVGVVRHILREHVRRDRALLKLTPAGQRIINAVLADEPDATVGALGAAE

SEQ ID NO: 1041 - protein, 330 aa, Haemophilus aegyptius
MNLISLFSGAGGLDLGFQKAGFRIICANEYDKSIWKTYESNHSAKLIKGDISKISSDEFPKCDGIIGGPPCQSWSEGGSLRGIDDPRGKLFYEYIRILKQKKPIFFLAENVKGMMAQRHNKAVQEFIQEFDNAGYDVHIILLNANDYGVAQDRKRVFYIGFRKELNINYLPPIPHLIKPTFKDVIWDLKDNPIPALDKNKTNGNKCIYPNHEYFIGSYSTIFMSRNRVRQWNEPAFTVQASGRQCQLHPQAPVMLKVSKNLNKFVEGKEHLYRRLTVRECARVQGFPDDFIFHYESLNDGYKMIGNAVPVNLAYEIAKTIKSALEICKGN

SEQ ID NO: 1042 - protein, 327 aa, Haemophilus haemolyticus
MIEIKDKQLTGLRFIDLFAGLGGFRLALESCGAECVYSNEWDKYAQEVYEMNFGEKPEGDITQVNEKTIPDHDILCAGFPCQAFSISGKQKGFEDSRGTLFFDIARIVREKKPKVVFMENVKNFASHDNGNTLEVVKNTMNELDYSFHAKVLNALDYGIPQKRERIYMICFRNDLNIQNFQFPKPFELNTFVKDLLLPDSEVEHLVIDRKDLVMTNQEIEQTTPKTVRLGIVGKGGQGERIYSTRGIAITLSAYGGGIFAKTGGYLVNGKTRKLHPRECARVMGYPDSYKVHPSTSQAYKQFGNSVVINVLQYIAYNIGSSLNFKPY

SEQ ID NO: 1043 - protein, 418 aa, Moraxella sp.
MKPEILKLIRSKLDLTQKQASEIIEVSDKTWQQWESGKTEMHPAYYSFLQEKLKDKINFEELSAQKTLQKKIFDKYNQNQITKNAEELAEITHIEERKDAYSSDFKFIDLFSGIGGIRQSFEVNGGKCVFSSEIDPFAKFTYYTNFGVVPFGDITKVEATTIPQHDILCAGFPCQPFSHIGKREGFEHPTQGTMFHEIVRIIETKKTPVLFLENVPGLINHDDGNTLKVIIETLEDMGYKVHHTVLDASHFGIPQKRKRFYLVAFLNQNIHFEFPKPPMISKDIGEVLESDVTGYSISEHLQKSYLFKKDDGKPSLIDKNTTGAVKTLVSTYHKIQRLTGTFVKDGETGIRLLTTNECKAIMGFPKDFVIPVSRTQMYRQMGNSVVVPVVTKIAEQISLALKTVNQQSPQENFELELV

SEQ ID NO: 1044 - protein, 537 aa, Ascobolus sp.
MSERRYEAGMTVALHEGSFLKIQRVYIRQYHADNRREHMLVGPLFRRTKYLKALSKKVNEVAIVHESIHVPVQDVIGVRELIITNRPFPECRKGDEHTGRLVCRWVYNLDERAKGREYKKQRYIRRITEAEADPEYRVEDRVLRRRWFQEGYIGDEISYKEHGNGDIVDIRSESPLQVLDGWGGDLVDLENGEETSIPGPCRSASSYGRLMKPPLAQAADSNTSRKYTFGDTFCGGGGVSLGARQAGLEVKWAFDMNPNAGANYRRNFPNTDFFLAEAEQFIQLSVGISQHVDILHLSPPCQTFSRAHTIAGKNDENNEASFFAVVNLIKAVRPRLFTVEETDGIMDRQSRQFIDTALMGITELGYSFRICVLNAIEYGVCQNRKRLIIIGAAPGEELPPFPLPTHQDFFSKDPRRDLLPAVTLDDALSTITPESTDHHLNHVWQPAEWKTPYDAHRPFKNAIRAGGGEYDIYPDGRRKFTVRELACIQGFPDEYEFVGTLTDKRRIIGNAVPPPLSAAIMSTLRQWMTEKDFERME

SEQ ID NO: 1045 - protein, 1534 aa, Arabidopsis sp.
MVENGAKAAKRKKRPLPEIQEVEDVPRTRRPRRAAACTSFKEKSIRVCEKSATIEVKKQQIVEEEFLALRLTALETDVEDRPTRRLNDFVLFDSDGVPQPLEMLEIHDIFVSGAILPSDVCTDKEKEKGVRCTSFGRVEHWSISGYEDGSPVIWISTELADYDCRKPAASYRKVYDYFYEKARASVAVYKKLSKSSGGDPDIGLEELLAAVVRSMSSGSKYFSSGAAIIDFVISQGDFIYNQLAGLDETAKKHESSYVEIPVLVALREKSSKIDKPLQRERNPSNGVRIKEVSQVAESEALTSDQLVDGTDDDRRYAILLQDEENRKSMQQPRKNSSSGSASNMFYIKINEDEIANDYPLPSYYKTSEEETDELILYDASYEVQSEHLPHRMLHNWALYNSDLRFISLELLPMKQCDDIDVNIFGSGVVTDDNGSWISLNDPDSGSQSHDPDGMCIFLSQIKEWMIEFGSDDIISISIRTDVAWYRLGKPSKLYAPWWKPVLKTARVGISILTFLRVESRVARLSFADVTKRLSGLQANDKAYISSDPLAVERYLVVHGQIILQLFAVYPDDNVKRCPFVVGLASKLEDRHHTKWIIKKKKISLKELNLNPRAGMAPVASKRKAMQATTTRLVNRIWGEFYSNYSPEDPLQATAAENGEDEVEEEGGNGEEEVEEEGENGLTEDTVPEPVEVQKPHTPKKIRGSSGKREIKWDGESLGKTSAGEPLYQQALVGGEMVAVGGAVTLEVDDPDEMPAIYFVEYMFESTDHCKMLHGRFLQRGSMTVLGNAANERELFLTNECMTTQLKDIKGVASFEIRSRPWGHQYRKKNITADKLDWARALERKVKDLPTEYYCKSLYSPERGGFFSLPLSDIGRSSGFCTSCKIREDEEKRSTIKLNVSKTGFFINGIEYSVEDFVYVNPDSIGGLKEGSKTSFKSGRNIGLRAYVVCQLLEIVPKESRKADLGSFDVKVRRFYRPEDVSAEKAYASDIQELYFSQDTVVLPPGALEGKCEVRKKSDMPLSREYPISDHIFFCDLFFDTSKGSLKQLPANMKPKFSTIKDDTLLRKKKGKGVESEIESEIVKPVEPPKEIRLATLDIFAGCGGLSHGLKKAGVSDAKWAIEYEEPAGQAFKQNHPESTVFVDNCNVILRAIMEKGGDQDDCVSTTEANELAAKLTEEQKSTLPLPGQVDFINGGPPCQGFSGMNRFNQSSWSKVQCEMILAFLSFADYFRPRYFLLENVRTFVSFNKGQTFQLTLASLLEMGYQVRFGILEAGAYGVSQSRKRAFIWAAAPEEVLPEWPEPMHVFGVPKLKISLSQGLHYAAVRSTALGAPFRPITVRDTIGDLPSVENGDSRTNKEYKEVAVSWFQKEIRGNTIALTDHICKAMNELNLIRCKLIPTRPGADWHDLPKRKVTLSDGRVEEMIPFCLPNTAERHNGWKGLYGRLDWQGNFPTSVTDPQPMGKVGMCFHPEQHRILTVRECARSQGFPDSYEFAGNINHKHRQIGNAVPPPLAFALGRKLKEALHLKKSPQHQP

SEQ ID NO: 1046 - protein, 1356 aa, Ascobolus sp.
MELTPELSGVSTDLGGGGSIFAHWRMKEESPAPTEILDDLNVLEWEKTTRDYSKEDLRIADQLFSIEDEHQSLPFETADAEDGTPTEEEEEKELPMRTLDNFVLYDASDLELAALDLIGTELNIHAVGTVGPIYTEGEEDEQEDEDEDVSPPVRTGTQATSASVTQMTVELYIRNIVQYEFCFNDDGTVETWIQTTNAHYKLLQPAKCYTSLYRPVNDCLNVITAIITLAPESTTMSLKDLLKVMDDKAQAVSYEEVERMSEFIVQHLDQWMETAPKKKSKLIEKSKVYIDLNNLAGIDMVSGVRPPPVRRVTGRSSAPKKRIVRNMNDAVLLHQNETTVTNWIHQLSAGMFGRALNVLGAETADVENLTCDPASAKFVVPQRRLHKRLKWETRGHIPVSEEEYKHIYQGKKYAKFFEAVRAVDESKLTIKLGDLVYVLDQDPKVTQTQFATAGREGRKKGAEKEKIQVRFGRVLSIRQPDSNSKDAQNVFIHVQWLVLGCDTILQEMASRRELFLTDSCDTVFADVIYGVAKLTPLGAKDIPTVEFHESMATMMGENEFFVRFKYNYQDGSFTDLKDVDAEQIGTLQPRVNTHRNPGYCSNCRIKYDNERTGDKWIYENDTEGEPRLFRSSKGWCIYAQEFVYLQPVEKQPGTTFRVGYISEINKSSVIVELLARVDDDDKSGHISYSDPRHLYFTGTDIKVTFDKIIRKCFVFHDSGDQKAKAPLMYGTLQRDLYYYRYEKRKGKAELVPVREIRSIHEQTLNDWESRTQIERHGAVSGKKLKGLDIFAGCGGLTLGLDLSGAVDTKWDIEFAPSAANTLALNFPDAQVFNQCANVLLSRAIQSEDEGSLDIEYDLQGRVLPDLPKKGEVDFIYGGPPCQGFSGVNRYKKGNDIKNSLVATFLSYVDHYKPRFVLLENVKGLITTKLGNSKNAEGKWEGGISNGVVKFIYRTLISMNYQCRIGLVQSGEYGVPQSRPRVIFLAARMGERLPDLPEPMHAFEVLDSQYALPHIKRYHTTQNGVAPLPRITIGEAVSDLPKFQYANPGVWPRHDPYSSAKAQPSDKTIEKFSVSKATSFVGYLLQPYHSRPQSEFQRRLRTKLVPSDEPAEKTSLLTTKLVTAHVTRLFNKETTQRIVCVPMWPGADHRSLPKEMRPWCLVDPNSQAEKHRFWPGLFGRLGMEDFFSTALTDVQPCGKQGKVLHPTQRRVYTVRELARAQGFPDWFAFTDGDADSGLGGVKKWHRNIGNAVPVPLGEQIGRCIGYSVWWKDDMIAQLREDGADEDEEMIDGNDQWVEELNTQMAADMPGLPLLVTHLLNLCVYRRLYGPNAKEFLPARVYDKKLEGGRRRLVWAML

SEQ ID NO: 1047 - protein, 1454 aa, Neurospora sp.
MDSPDRSHGGMFIDVPAETMGFQEDYLDMFASVLSQGLAKEGDYAHHQPLPAGKEECLEPIAVATTITPSPDDPQLQLQLELEQQFQTESGLNGVDPAPAPESEDEADLPDGFSDESPDDDFVVQRSKHITVDLPVSTLINPRSTFQRIDENDNLVPPPQSTPERVAVEDLLKAAKAAGKNKEDYIEFELHDFNFYVNYAYHPQEMRPIQLVATKVLHDKYYFDGVLKYGNTKHYVTGMQVLELPVGNYGASLHSVKGQIWVRSKHNAKKEIYYLLKKPAFEYQRYYQPFLWIADLGKHVVDYCTRMVERKREVTLGCFKSDFIQWASKAHGKSKAFQNWRAQHPSDDFRTSVAANIGYIWKEINGVAGAKRAAGDQLFRELMIVKPGQYFRQEVPPGPVVTEGDRTVAATIVTPYIKECFGHMILGKVLRLAGEDAEKEKEVKLAKRLKIENKNATKADTKDDMKNDTATESLPTPLRSLPVQVLEATPIESDIVSIVSSDLPPSENNPPPLTNGSVKPKAKANPKPKPSTQPLHAAHVKYLSQELVNKIKVGDVISTPRDDSSNTDTKWKPTDTDDHRWFGLVQRVHTAKTKSSGRGLNSKSFDVIWFYRPEDTPCCAMKYKWRNELFLSNHCTCQEGHHARVKGNEVLAVHPVDWFGTPESNKGEFFVRQLYESEQRRWITLQKDHLTCYHNQPPKPPTAPYKPGDTVLATLSPSDKFSDPYEVVEYFTQGEKETAFVRLRKLLRRRKVDRQDAPANELVYTEDLVDVRAERIVGKCIMRCFRPDERVPSPYDRGGTGNMFFITHRQDHGRCVPLDTLPPTLRQGFNPLGNLGKPKLRGMDLYCGGGNFGRGLEEGGVVEMRWANDIWDKAIHTYMANTPDPNKTNPFLGSVDDLLRLALEGKFSDNVPRPGEVDFIAAGSPCPGFSLLTQDKKVLNQVKNQSLVASFASFVDFYRPKYGVLENVSGIVQTFVNRKQDVLSQLFCALVGMGYQAQLILGDAWAHGAPQSRERVFLYFAAPGLPLPDPPLPSHSHYRVKNRNIGFLCNGESYVQRSFIPTAFKFVSAGEGTADLPKIGDGKPDACVRFPDHRLASGITPYIRAQYACIPTHPYGMNFIKAWNNGNGVMSKSDRDLFPSEGKTRTSDASVGWKRLNPKTLFPTVTTTSNPSDARMGPGLHWDEDRPYTVQEMRRAQGYLDEEVLVGRTTDQWKLVGNSVSRHMALAIGLKFREAWLGTLYDESAVVATATATATTAAAVGVTVPVMEEPGIGTTESSRPSRSPVHTAVDLDDSKSERSRSTTPATVLSTSSAAGDGSANAAGLEDDDNDDMEMMEVTRKRSSPAVDEEGMRPSKVQKVEVTVASPASRRSSRQASRNPTASPSSKASKATTHEAPAPEELESDAESYSETYDKEGFDGDYHSGHEDQYSEEDEEEEYAEPETMTVNGMTIVKL

SEQ ID NO: 1048 - protein, 345 aa, Drosophila sp.
MVFRVLELFSGIGGMHYAFNYAQLDGQIVAALDVNTVANAVYAHNYGSNLVKTRNIQSLSVKEVTKLQANMLLMSPPCQPHTRQGLQRDTEDKRSDALTHLCGLIPECQELEYILMENVKGFESSQARNQFIESLERSGFHWREFILTPTQFNVPNTRYRYYCIARKGADFPFAGGKIWEEMPGAIAQNQGLSQIAEIVEENVSPDFLVPDDVLTKRVLVMDIIHPAQSRSMCFTKGYTHYTEGTGSAYTPLSEDESHRIFELVKEIDTSNQDASKSEKILQQRLDLLHQVRLRYFTPREVARLMSFPENFEFPPETTNRQKYRLLGNSINVKVVGELIKLLTIK

SEQ ID NO: 1049 - protein, 330 aa, Schizosaccharomyces pombe
MLSTKRLRVLELYSGIGGMHYALNLANIPADIVCAIDINPQANEIYNLNHGKLAKHMDISTLTAKDFDAFDCKLWTMSPSCQPFTRIGNRKDILDPRSQAFLNILNVLPHVNNLPEYILIENVQGFEESKAAEECRKVLRNCGYNLIEGILSPNQFNIPNSRSRWYGLARLNFKGEWSIDDVFQFSEVAQKEGEVKRIRDYLEIERDWSSYMVLESVLNKWGHQFDIVKPDSSSCCCFTRGYTHLVQGAGSILQMSDHENTHEQFERNRMALQLRYFTAREVARLMGFPESLEWSKSNVTEKCMYRLLGNSINVKVVSYLISLLLEPLNF

SEQ ID NO: 1050 - protein, 624 aa, Arabidopsis sp.
MVMSHIFLISQIQEVEHGDSDDVNWNTDDDELAIDNFQFSPSPVHISATSPNSIQNRISDETVASFVEMGFSTQMIARAIEETAGANMEPMMILETLFNYSASTEASSSKSKVINHFIAMGFPEEHVIKAMQEHGDEDVGEITNALLTYAEVDKLRESEDMNININDDDDDNLYSLSSDDEEDELNNSSNEDRILQALIKMGYLREDAAIAIERCGEDASMEEVVDFICAAQMARQFDEIYAEPDKKELMNNNKKRRTYTETPRKPNTDQLISLPKEMIGFGVPNHPGLMMHRPVPIPDIARGPPFFYYENVAMTPKGVWAKISSHLYDIVPEFVDSKHFCAAARKRGYIHNLPIQNRFQIQPPQHNTIQEAFPLTKRWWPSWDGRTKLNCLLTCIASSRLTEKIREALERYDGETPLDVQKWVMYECKKWNLVWVGKNKLAPLDADEMEKLLGFPRDHTRGGGISTTDRYKSLGNSFQVDTVAYHLSVLKPLFPNGINVLSLFTGIGGGEVALHRLQIKMNVVVSVEISDANRNILRSFWEQTNQKGILREFKDVQKLDDNTIERLMDEYGGFDLVIGGSPCNNLAGGNRHHRVGLGGEHSSLFFDYCRILEAVRRKARHMRR

SEQ ID NO: 1051 - protein, 626 aa, Arabidopsis sp.
MVIWNNDDDDFLEIDNFQSSPRSSPIHAMQCRVENLAGVAVTTSSLSSPTETTDLVQMGFSDEVFATLFDMGFPVEMISRAIKETGPNVETSVIIDTISKYSSDCEAGSSKSKAIDHFLAMGFDEEKVVKAIQEHGEDNMEAIANALLSCPEAKKLPAAVEEEDGIDWSSSDDDTNYTDMLNSDDEKDPNSNENGSKIRSLVKMGFSELEASLAVERCGENVDIAELTDFLCAAQMAREFSEFYTEHEEQKPRHNIKKRRFESKGEPRSSVDDEPIRLPNPMIGFGVPNEPGLITHRSLPELARGPPFFYYENVALTPKGVWETISRHLFEIPPEFVDSKYFCVAARKRGYIHNLPINNRFQIQPPPKYTIHDAFPLSKRWWPEWDKRTKLNCILTCTGSAQLTNRIRVALEPYNEEPEPPKHVQRYVIDQCKKWNLVWVGKNKAAPLEPDEMESILGFPKNHTRGGGMSRTERFKSLGNSFQVDTVAYHLSVLKPIFPHGINVLSLFTGIGGGEVALHRLQIKMKLVVSVEISKVNRNILKDFWEQTNQTGELIEFSDIQHLTNDTIEGLMEKYGGFDLVIGGSPCNNLAGGNRVSRVGLEGDQSSLFFEYCRILEVVRARMRGS

SEQ ID NO: 1052 - protein, 791 aa, Arabidopsis sp.
MAARNKQKKRAEPESDLCFAGKPMSVVESTIRWPHRYQSKKTKLQAPTKKPANKGGKKEDEEIIKQAKCHFDKALVDGVLINLNDDVYVTGLPGKLKFIAKVIELFEADDGVPYCRFRWYYRPEDTLIERFSHLVQPKRVFLSNDENDNPLTCIWSKVNIAKVPLPKITSRIEQRVIPPCDYYYDMKYEVPYLNFTSADDGSDASSSLSSDSALNCFENLHKDEKFLLDLYSGCGAMSTGFCMGASISGVKLITKWSVDINKFACDSLKLNHPETEVRNEAAEDFLALLKEWKRLCEKFSLVSSTEPVESISELEDEEVEENDDIDEASTGAELEPGEFEVEKFLGIMFGDPQGTGEKTLQLMVRWKGYNSSYDTWEPYSGLGNCKEKLKEYVIDGFKSHLLPLPGTVYTVCGGPPCQGISGYNRYRNNEAPLEDQKNQQLLVFLDIIDFLKPNYVLMENVVDLLRFSKGFLARHAVASFVAMNYQTRLGMMAAGSYGLPQLRNRVFLWAAQPSEKLPPYPLPTHEVAKKFNTPKEFKDLQVGRIQMEFLKLDNALTLADAISDLPPVTNYVANDVMDYNDAAPKTEFENFISLKRSETLLPAFGGDPTRRLFDHQPLVLGDDDLERVSYIPKQKGANYRDMPGVLVHNNKAEINPRFRAKLKSGKNVVPAYAISFIKGKSKKPFGRLWGDEIVNTVVTRAEPHNQCVIHPMQNRVLSVRENARLQGFPDCYKLCGTIKEKYIQVGNAVAVPVGVALGYAFGMASQGLTDDEPVIKLPFKYPECMQAKDQI

SEQ ID NO: 1053 - protein, 1295 aa, Arabidopsis sp.
MLSPAKCESEEAQAPLDLHSSSRSEPECLSLVLWCPNPEEAAPSSTRELIKLPDNGEMSLRRSTTLNCNSPEENGGEGRVSQRKSSRGKSQPLLMLTNGCQLRRSPRFRALHANFDNVCSVPVTKGGVSQRKFSRGKSQPLLTLTNGCQLRRSPRFRAVDGNFDSVCSVPVTGKFGSRKRKSNSALDKKESSDSEGLTFKDIAVIAKSLEMEIISECQYKNNVAEGRSRLQDPAKRKVDSDTLLYSSINSSKQSLGSNKRMRRSQRFMKGTENEGEENLGKSKGKGMSLASCSFRRSTRLSGTVETGNTETLNRRKDCGPALCGAEQVRGTERLVQISKKDHCCEAMKKCEGDGLVSSKQELLVFPSGCIKKTVNGCRDRTLGKPRSSGLNTDDIHTSSLKISKNDTSNGLTMTTALVEQDAMESLLQGKTSACGAADKGKTREMHVNSTVIYLSDSDEPSSIEYLNGDNLTQVESGSALSSGGNEGIVSLDLNNPTKSTKRKGKRVTRTAVQEQNKRSICFFIGEPLSCEEAQERWRWRYELKERKSKSRGQQSEDDEDKIVANVECHYSQAKVDGHTFSLGDFAYIKGEEEETHVGQIVEFFKTTDGESYFRVQWFYRATDTIMERQATNHDKRRLFYSTVMNDNPVDCLISKVTVLQVSPRVGLKPNSIKSDYYFDMEYCVEYSTFQTLRNPKTSENKLECCADVVPTESTESILKKKSFSGELPVLDLYSGCGGMSTGLSLGAKISGVDVVTKWAVDQNTAACKSLKLNHPNTQVRNDAAGDFLQLLKEWDKLCKRYVFNNDQRTDTLRSVNSTKETSGSSSSSDDDSDSEEYEVEKLVDICFGDHDKTGKNGLKFKVHWKGYRSDEDTWELAEELSNCQDAIREFVTSGFKSKILPLPGRVGVICGGPPCQGISGYNRHRNVDSPLNDERNQQIIVFMDIVEYLKPSYVLMENVVDILRMDKGSLGRYALSRLVNMRYQARLGIMTAGCYGLSQFRSRVFMWGAVPNKNLPPFPLPTHDVIVRYGLPLEFERNVVAYAEGQPRKLEKALVLKDAISDLPHVSNDEDREKLPYESLPKTDFQRYIRSTKRDLTGSAIDNCNKRTMLLHDHRPFHINEDDYARVCQIPKRKGANFRDLPGLIVRNNTVCRDPSMEPVILPSGKPLVPGYVFTFQQGKSKRPFARLWWDETVPTVLTVPTCHSQALLHPEQDRVLTIRESARLQGFPDYFQFCGTIKERYCQIGNAVAVSVSRALGYSLGMAFRGLARDEHLIKLPQNFSHSTYPQLQETIPH

SEQ ID NO: 1054 - protein, 839 aa, Arabidopsis sp.
MAPKRKRPATKDDTTKSIPKPKKRAPKRAKTVKEEPVTVVEEGEKHVARFLDEPIPESEAKSTWPDRYKPIEVQPPKASSRKKTKDDEKVEIIRARCHYRRAIVDERQIYELNDDAYVQSGEGKDPFICKIIEMFEGANGKLYFTARWFYRPSDTVMKEFEILIKKKRVFFSEIQDTNELGLLEKKLNILMIPLNENTKETIPATENCDFFCDMNYFLPYDTFEAIQQETMMAISESSTISSDTDIREGAAAISEIGECSQETEGHKKATLLDLYSGCGAMSTGLCMGAQLSGLNLVTKWAVDMNAHACKSLQHNHPETNVRNMTAEDFLFLLKEWEKLCIHFSLRNSPNSEEYANLHGLNNVEDNEDVSEESENEDDGEVFTVDKIVGISFGVPKKLLKRGLYLKVRWLNYDDSHDTWEPIEGLSNCRGKIEEFVKLGYKSGILPLPGGVDVVCGGPPCQGISGHNRFRNLLDPLEDQKNKQLLVYMNIVEYLKPKFVLMENVVDMLKMAKGYLARFAVGRLLQMNYQVRNGMMAAGAYGLAQFRLRFFLWGALPSEIIPQFPLPTHDLVHRGNIVKEFQGNIVAYDEGHTVKLADKLLLKDVISDLPAVANSEKRDEITYDKDPTTPFQKFIRLRKDEASGSQSKSKSKKHVLYDHHPLNLNINDYERVCQVPKRKGANFRDFPGVIVGPGNVVKLEEGKERVKLESGKTLVPDYALTYVDGKSCKPFGRLWWDEIVPTVVTRAEPHNQVIIHPEQNRVLSIRENARLQGFPDDYKLFGPPKQKYIQVGNAVAVPVAKALGYALGTAFQGLAVGKDPLLTLPEGFAFMKPTLPSELA

SEQ ID NO: 1055 - protein, 142 aa, Neurospora sp.
MAEQNPFVIDDEDDVIQIHDEEEVEEEVAEVIDITEDDIEPSELDRAFGSRPKEETLPSLLLRDQGFIVRPGMTVELKAPIGRFAISFVRVNSIVKVRQAHVNNVTIRGHGFTRAKEMNGMLPKQLNECCLVASIDTRDPRP

SEQ ID NO: 1056 - protein, 529 aa, Escherichia coli
MNNNDLVAKLWKLCDNLRDGGVSYQNYVNELASLLFLKMCKETGQEAEYLPEGYRWDDLKSRIGQEQLQFYRKMLVHLGEDDKKLVQAVFHNVSTTITEPKQITALVSNMDSLDWYNGAHGKSRDDFGDMYEGLLQKNANETKSGAGQYFTPRPLIKTIIHLLKPQPREVVQDPAAGTAGFLIEADRYVKSQTNDLDDLDGDTQDFQIHRAFIGLELVPGTRRLALMNCLLHDIEGNLDHGGAIRLGNTLGSDGENLPKAHIVATNPPFGSAAGTNITRTFVHPTSNKQLCFMQHIIETLHPGGRAAVVVPDNVLFEGGKGTDIRRDLMDKCHLHTILRLPTGIFYAQGVKTNVLFFTKGTVANPNQDKNCTDDVWVYDLRTNMPSFGKRTPFTDEHLQPFERVYGEDPHGLSPRTEGEWSFNAEETEVADSEENKNTDQHLATSRWRKFSREWIRTAKSDSLDISWLKDKDSIDADSLPEPDVLAAEAMGELVQALSELDALMRELGASDEADLQRQLLEEAFGGVKE

SEQ ID NO: 1057 - protein, 464 aa, Escherichia coli
MSAGKLPEGWVIAPVSTVTTLIRGVTYKKEQAINYLKDDYLPLIRANNIQNGKFDTTDLVFVPKNLVKESQKISPEDIVIAMSSGSKSVVGKSAHQHLPFECSFGAFCGVLRPEKLIFSGFIAHFTKSSLYRNKISSLSAGANINNIKPASFDLINIPIPPLAEQKIIAEKLDTLLAQVDSTKARFEQIPQILKRFRQAVLGGAVNGKLTEKWRNFEPQHSVFKKLNFESILTELRNGLSSKPNESGVGHPILRISSVRAGHVDQNDIRFLECSESELNRHKLQDGDLLFTRYNGSLEFVGVCGLLKKLQHQNLLYPDKLIRARLTKDALPEYIEIFFSSPSARNAMMNCVKTTSGQKGISGKDIKSQVVLLPPVKEQAEIVRRVEQLFAYADTIEKQVNNALARVNNLTQSILAKAFRGELTAQWRAENPDLISGENSAAALLEKIKAERAASGGKKASRKKS

SEQ ID NO: 1058 - protein, 421 aa, Thermus aquaticus
MGLPPLLSLPSNSAPRSLGRVETPPEVVDFMVSLAEAPRGGRVLEPACAHGPFLRAFREAHGTAYRFVGVEIDPKALDLPPWAEGILADFLLWEPGEAFDLILGNPPYGIVGEASKYPIHVFKAVKDLYKKAFSTWKGKYNLYGAFLEKAVRLLKPGGVLVFVVPATWLVLEDFALLREFLAREGKTSVYYLGEVFPQKKVSAVVIRFQKSGKGLSLWDTQESESGFTPILWAEYPHWEGEIIRFETEETRKLEISGMPLGDLFHIRFAARSPEFKKHPAVRKEPGPGLVPVLTGRNLKPGWVDYEKNHSGLWMPKERAKELRDFYATPHLVVAHTKGTRVVAAWDERAYPWREEFHLLPKEGVRLDPSSLVQWLNSEAMQKHVRTLYRDFVPHLTLRMLERLPVRREYGFHTSPESARNF

SEQ ID NO: 1059 - protein, 278 aa, Escherichia coli
MKKNRAFLKWAGGKYPLLDDIKRHLPKGECLVEPFVGAGSVFLNTDFSRYILADINSDLISLYNIVKMRTDEYVQAARELFVPETNCAEVYYQFREEFNKSQDPFRRAVLFLYLNRYGYNGLCRYNLRGEFNVPFGRYKKPYFPEAELYHFAEKAQNAFFYCESYADSMARADDASVVYCDPPYAPLSATANFTAYHTNSFTLEQQAHLAEIAEGLVERHIPVLISNHDTMLTREWYQRAKLHVVKVRRSISSNGGTRKKVDELLALYKPGVVSPAKK

SEQ ID NO: 1060 - protein, 358 aa, Caulobacter crescentus
MKFGPETIIHGDCIEQMNALPEKSVDLIFADPPYNLQLGGDLLRPDNSKVDAVDDHWDQFESFAAYDKFTREWLKAARRVLKDDGAIWVIGSYHNIFRVGVAVQDLGFWILNDIVWRKSNPMPNFKGTRFANAHETLIWASKSQNAKRYTFNYDALKMANDEVQMRSDWTIPLCTGEERIKGADGQKAHPTQKPEALLYRVILSTTKPGDVILDPFFGVGTTGAAAKRLGRKFIGIEREAEYLEHAKARIAKVVPIAPEDLDVMGSKRAEPRVPFGTIVEAGLLSPGDTLYCSKGTHVAKVRPDGSITVGDLSGSIHKIGALVQSAPACNGWTYWHFKTDAGLAPIDVLRAQVRAGMN

SEQ ID NO: 1061 - protein, 577 aa, Clostridioides difficile
MDDISQDNFLLSKEYENSLDVDTKKASGIYYTPKIIVDYIVKKTLKNHDIIKNPYPRILDISCGCGNFLLEVYDILYDLFEENIYELKKKYDENYWTVDNIHRHILNYCIYGADIDEKAISILKDSLTNKKVVNDLDESDIKINLFCCDSLKKKWRYKFDYIVGNPPYIGHKKLEKKYKKFLLEKYSEVYKDKADLYFCFYKKIIDILKQGGIGSVITPRYFLESLSGKDLREYIKSNVNVQEIVDFLGANIFKNIGVSSCILTFDKKKTKETYIDVFKIKNEDICINKFETLEELLKSSKFEHFNINQRLLSDEWILVNKDDETFYNKIQEKCKYSLEDIAISFQGIITGCDKAFILSKDDVKLNLVDDKFLKCWIKSKNINKYIVDKSEYRLIYSNDIDNENTNKRILDEIIGLYKTKLENRRECKSGIRKWYELQWGREKLFFERKKIMYPYKSNENRFAIDYDNNFSSADVYSFFIKEEYLDKFSYEYLVGILNSSVYDKYFKITAKKMSKNIYDYYPNKVMKIRIFRDNNYEEIENLSKQIISILLNKSIDKGKVEKLQIKMDNLIMDSLGI

SEQ ID NO: 1062 - protein, 835 aa, synthetic construct
MAASAAAASAAAASAASGSPGPGEGSAGGEKRSTAPSAAASASASAAASSPAGGGAEALELLEHCGVCRERLRPEREPRLLPCLHSACSACLGPAAPAAANSSGDGGAAGDGTVVDCPVCKQQCFSKDIVENYFMRDSGSKAATDAQDANQCCTSCEDNAPATSYCVECSEPLCETCVEAHQRVKYTKDHTVRSTGPAKSRDGERTVYCNVHKHEPLVLFCESCDTLTCRDCQLNAHKDHQYQFLEDAVRNQRKLLASLVKRLGDKHATLQKSTKEVRSSIRQVSDVQKRVQVDVKMAILQIMKELNKRGRVLVNDAQKVTEGQQERLERQHWTMTKIQKHQEHILRFASWALESDNNTALLLSKKLIYFQLHRALKMIVDPVEPHGEMKFQWDLNAWTKSAEAFGKIVAERPGTNSTGPAPMAPPRAPGPLSKQGSGSSQPMEVQEGYGFGSGDDPYSSAEPHVSGVKRSRSGEGEVSGLMRKVPRVSLERLDLDLTADSQPPVFKVFPGSTTEDYNLIVIERGAAAAATGQPGTAPAGTPGAPPLAGMAIVKEEETEAAIGAPPTATEGPETKPVLMALAEGPGAEGPRLASPSGSTSSGLEVVAPEGTSAPGGGPGTLDDSATICRVCQKPGDLVMCNQCEFCFHLDCHLPALQDVPGEEWSCSLCHVLPDLKEEDGSLSLDGADSTGVVAKLSPANQRKCERVLLALFCHEPCRPLHQLATDSTFSLDQPGGTLDLTLIRARLQEKLSPPYSSPQEFAQDVGRMFKQFNKLTEDKADVQSIIGLQRFFETRMNEAFGDTKFSAVLVEPPPMSLPGAGLSSQELSGGPGDGP

SEQ ID NO: 1063 - protein, 486 aa, synthetic construct
MVAGMLGLREEKSEDQDLQGLKDKPLKFKKVKKDKKEEKEGKHEPVQPSAHHSAEPAEAGKAETSEGSGSAPAVPEASASPKQRRSIIRDRGPMYDDPTLPEGWTRKLKQRKSGRSAGKYDVYLINPQGKAFRSKVELIAYFEKVGDTSLDPNDFDFTVTGRGSPSRREQKPPKKPKSPKAPGTGRGRGRPKGSGTTRPKAATSEGVQVKRVLEKSPGKLLVKMPFQTSPGGKAEGGGATTSTQVMVIKRPGRKRKAEADPQAIPKKRGRKPGSVVAAAAAEAKKKAVKESSIRSVQETVLPIKKRKTRETVSIEVKEVVKPLLVSTLGEKSGKGLKTCKSPGRKSKESSPKGRSSSASSPPKKEHHHHHHHSESPKAPVPLLPPLPPPPPEPESSEDPTSPPEPQDLSSSVCKEEKMPRGGSLESDGCPKEPAKTQPAVATAATAAEKYKHRGEGERKDIVSSSMPRPNREEPVDSRTPVTERVS

SEQ ID NO: 1064 - protein, 16 aa, synthetic construct
SGSETPGTSESATPES

SEQ ID NO: 1065 - protein, 4 aa, synthetic construct
SGGS

SEQ ID NO: 1066 - protein, 24 aa, synthetic construct
SGGSSGSETPGTSESATPESSGGS

SEQ ID NO: 1067 - protein, 32 aa, synthetic construct
SGGSSGGSSGSETPGTSESATPESSGGSSGGS

SEQ ID NO: 1068 - protein, 104 aa, synthetic construct
GGSGGSPGSPAGSPTSTEEGTSESATPESGPGTSTEPSEGSAPGSPAGSPTSTEEGTSTEPSEGSAPGTSTEPSEGSAPGTSESATPESGPGSEPATSGGSGGS

SEQ ID NO: 1069 - protein, 16 aa, synthetic construct
SGSETPGTSESATPES

SEQ ID NO: 1070 - protein, 24 aa, synthetic construct
SGGSSGGSSGSETPGTSESATPES

SEQ ID NO: 1071 - protein, 40 aa, synthetic construct
SGGSSGGSSGSETPGTSESATPESSGGSSGGSSGGSSGGS

SEQ ID NO: 1072 - protein, 64 aa, synthetic construct
SGGSSGGSSGSETPGTSESATPESSGGSSGGSSGGSSGGSSGSETPGTSESATPESSGGSSGGS

SEQ ID NO: 1073 - protein, 92 aa, synthetic construct
PGSPAGSPTSTEEGTSESATPESGPGTSTEPSEGSAPGSPAGSPTSTEEGTSTEPSEGSAPGTSTEPSEGSAPGTSESATPESGPGSEPATS

SEQ ID NO: 1074 - protein, 7 aa, synthetic construct
PKKKRKV

SEQ ID NO: 1075 - protein, 20 aa, synthetic construct
AVKRPAATKKAGQAKKKKLD

SEQ ID NO: 1076 - protein, 25 aa, synthetic construct
MSRRRKANPTKLSENAKKLAKEVEN

SEQ ID NO: 1077 - protein, 9 aa, synthetic construct
PAAKRVKLD

SEQ ID NO: 1078 - protein, 9 aa, synthetic construct
KLKIKRPVK

SEQ ID NO: 1079 - protein, 30 aa, synthetic construct
MDSLLMNRRKFLYQFKNVRWAKGRRETYLC

SEQ ID NO: 1080 - protein, 2087 aa, synthetic construct
MNHDQEFDPPKVYPPVPAEKRKPIRVLSLFDGIATGLLVLKDLGIQVDRYIASEVCEDSITVGMVRHQGKIMYVGDVRSVTQKHIQEWGPFDLVIGGSPCNDLSIVNPARKGLYEGTGRLFFEFYRLLHDARPKEGDDRPFFWLFENVVAMGVSDKRDISRFLESNPVMIDAKEVSAAHRARYFWGNLPGMNRPLASTVNDKLELQECLEHGRIAKFSKVRTITTRSNSIKQGKDQHFPVFMNEKEDILWCTEMERVFGFPVHYTDVSNMSRLARQRLLGRSWSVPVIRHLFAPLKEYFACVSSGNSNANSRGPSFSSGLVPLSLRGSHMGPMEIYKTVSAWKRQPVRVLSLFRNIDKVLKSLGFLESGSGSGGGTLKYVEDVTNVVRRDVEKWGPFDLVYGSTQPLGSSCDRCPGWYMFQFHRILQYALPRQESQRPFFWIFMDNLLLTEDDQETTTRFLQTEAVTLQDVRGRDYQNAMRVWSNIPGLKSKHAPLTPKEEEYLQAQVRSRSKLDAPKVDLLVKNCLLPLREYFKYFSQNSLPLGGPSSGAPPPSGGSPAGSPTSTEEGTSESATPESGPGTSTEPSEGSAPGSPAGSPTSTEEGTSTEPSEGSAPGTSTEPSEPKKKRKVYMDKKYSIGLAIGTNSVGWAVITDEYKVPSKKFKVLGNTDRHSIKKNLIGALLFDSGETAEATRLKRTARRRYTRRKNRICYLQEIFSNEMAKVDDSFFHRLEESFLVEEDKKHERHPIFGNIVDEVAYHEKYPTIYHLRKKLVDSTDKADLRLIYLALAHMIKFRGHFLIEGDLNPDNSDVDKLFIQLVQTYNQLFEENPINASGVDAKAILSARLSKSRRLENLIAQLPGEKKNGLFGNLIALSLGLTPNFKSNFDLAEDAKLQLSKDTYDDDLDNLLAQIGDQYADLFLAAKNLSDAILLSDILRVNTEITKAPLSASMIKRYDEHHQDLTLLKALVRQQLPEKYKEIFFDQSKNGYAGYIDGGASQEEFYKFIKPILEKMDGTEELLVKLNREDLLRKQRTFDNGSIPHQIHLGELHAILRRQEDFYPFLKDNREKIEKILTFRIPYYVGPLARGNSRFAWMTRKSEETITPWNFEEVVDKGASAQSFIERMTNFDKNLPNEKVLPKHSLLYEYFTVYNELTKVKYVTEGMRKPAFLSGEQKKAIVDLLFKTNRKVTVKQLKEDYFKKIECFDSVEISGVEDRFNASLGTYHDLLKIIKDKDFLDNEENEDILEDIVLTLTLFEDREMIEERLKTYAHLFDDKVMKQLKRRRYTGWGRLSRKLINGIRDKQSGKTILDFLKSDGFANRNFMQLIHDDSLTFKEDIQKAQVSGQGDSLHEHIANLAGSPAIKKGILQTVKVVDELVKVMGRHKPENIVIEMARENQTTQKGQKNSRERMKRIEEGIKELGSQILKEHPVENTQLQNEKLYLYYLQNGRDMYVDQELDINRLSDYDVDAIVPQSFLKDDSIDNKVLTRSDKNRGKSDNVPSEEVVKKMKNYWRQLLNAKLITQRKFDNLTKAERGGLSELDKAGFIKRQLVETRQITKHVAQILDSRMNTKYDENDKLIREVKVITLKSKLVSDFRKDFQFYKVREINNYHHAHDAYLNAVVGTALIKKYPKLESEFVYGDYKVYDVRKMIAKSEQEIGKATAKYFFYSNIMNFFKTEITLANGEIRKRPLIETNGETGEIVWDKGRDFATVRKVLSMPQVNIVKKTEVQTGGFSKESILPKRNSDKLIARKKDWDPKKYGGFDSPTVAYSVLVVAKVEKGKSKKLKSVKELLGITIMERSSFEKNPIDFLEAKGYKEVKKDLIIKLPKYSLFELENGRKRMLASAGELQKGNELALPSKYVNFLYLASHYEKLKGSPEDNEQKQLFVEQHKHYLDEIIEQISEFSKRVILADANLDKVLSAYNKHRDKPIREQAENIIHLFTLTNLGAPAAFKYFDTTIDRKRYTSTKEVLDATLIHQSITGLYETRIDLSQLGGDPKKKRKVSGSETPGTSESATPESTGRTLVTFKDVFVDFTREEWKLLDTAQQIVYRNVMLENYKNLVSLGYQLTKPDVILRLEKGEEP

SEQ ID NO: 1081 - protein, 690 aa, synthetic construct
  VARIANT 651..657: note = any amino acid
  VARIANT 659..660: note = TR, LR or LK
  VARIANT 679..685: note = any amino acid
  VARIANT 687..688: note = TR, LR or LK
MNHDQEFDPPKVYPPVPAEKRKPIRVLSLFDGIATGLLVLKDLGIQVDRYIASEVCEDSITVGMVRHQGKIMYVGDVRSVTQKHIQEWGPFDLVIGGSPCNDLSIVNPARKGLYEGTGRLFFEFYRLLHDARPKEGDDRPFFWLFENVVAMGVSDKRDISRFLESNPVMIDAKEVSAAHRARYFWGNLPGMNRPLASTVNDKLELQECLEHGRIAKFSKVRTITTRSNSIKQGKDQHFPVFMNEKEDILWCTEMERVFGFPVHYTDVSNMSRLARQRLLGRSWSVPVIRHLFAPLKEYFACVSSGNSNANSRGPSFSSGLVPLSLRGSHMGPMEIYKTVSAWKRQPVRVLSLFRNIDKVLKSLGFLESGSGSGGGTLKYVEDVTNVVRRDVEKWGPFDLVYGSTQPLGSSCDRCPGWYMFQFHRILQYALPRQESQRPFFWIFMDNLLLTEDDQETTTRFLQTEAVTLQDVRGRDYQNAMRVWSNIPGLKSKHAPLTPKEEEYLQAQVRSRSKLDAPKVDLLVKNCLLPLREYFKYFSQNSLPLGGPSSGAPPPSGGSPAGSPTSTEEGTSESATPESGPGTSTEPSEGSAPGSPAGSPTSTEEGTSTEPSEGSAPGTSTEPSEPKKKRKVYSRPGERPFQCRICMRNFSXXXXXXXHXXTHTGEKPFQCRICMRNFSXXXXXXXHXXTH

SEQ ID NO: 1082 - DNA, 3182 bp, Hepatitis B virus
  source 1..3182: mol_type = genomic DNA
aattccacaaccttccaccaaactctgcaagatcccagagtgagaggcctgtatttccctgctggtggctccagttcaggaacagtaaaccctgttctgactactgcctctcccttatcgtcaatcttctcgaggattggggaccctgcgctgaacatggagaacatcacatcaggattcctaggaccccttctcgtgttacaggcggggtttttcttgttgacaagaatcctcacaataccgcagagtctagactcgtggtggacttctctcaattttctagggggaactaccgtgtgtcttggccaaaattcgcagtccccaacctccaatcactcaccaacctcttgtcctccaacttgtcctggttatcgctggatgtgtctgcggcgttttatcatcttcctcttcatcctgctgctatgcctcatcttcttgttggttcttctggactatcaaggtatgttgcccgtttgtcctctaattccaggatcctcaacaaccagcacgggaccatgccggacctgcatgactactgctcaaggaacctctatgtatccctcctgttgctgtaccaaaccttcggacggaaattgcacctgtattcccatcccatcatcctgggctttcggaaaattcctatgggagtgggcctcagcccgtttctcctggctcagtttactagtgccatttgttcagtggttcgtagggctttcccccactgtttggctttcagttatatggatgatgtggtattgggggccaagtctgtacagcatcttgagtccctttttaccgctgttaccaattttcttttgtctttgggtatacatttaaaccctaacaaaacaaagagatggggttactctctaaattttatgggttatgtcattggatgttatgggtccttgccacaagaacacatcatacaaaaaatcaaagaatgttttagaaaacttcctattaacaggcctattgattggaaagtatgtcaacgaattgtgggtcttttgggttttgctgccccttttacacaatgtggttatcctgcgttgatgcctttgtatgcatgtattcaatctaagcaggctttcactttctcgccaacttacaaggcctttctgtgtaaacaatacctgaacctttaccccgttgcccggcaacggccaggtctgtgccaagtgtttgctgacgcaacccccactggctggggcttggtcatgggccatcagcgcatgcgtggaaccttttcggctcctctgccgatccatactgcggaactcctagccgcttgttttgctcgcagcaggtctggagcaaacattatcgggactgataactctgttgtcctatcccgcaaatatacatcgtttccatggctgctaggctgtgctgccaactggatcctgcgcgggacgtcctttgtttacgtcccgtcggcgctgaatcctgcggacgacccttctcggggtcgcttgggactctctcgtccccttctccgtctgccgttccgaccgaccacggggcgcacctctctttacgcggactccccgtctgtgccttctcatctgccggaccgtgtgcacttcgcttcacctctgcacgtcgcatggagaccaccgtgaacgcccaccaaatattgcccaaggtcttacataagaggactcttggactctcagcaatgtcaacgaccgaccttgaggcatacttcaaagactgtttgtttaaagactgggaggagttgggggaggagattaggttaaaggtctttgtactaggaggctgtaggcataaattggtctgcgcaccagcaccatgcaactttttcacctctgcctaatcatctcttgttcatgtcctactgttcaagcctccaagctgtgccttgggtggctttggggcatggacatcgacccttataaagaatttggagctactgtggagttactctcgtttttgccttctgacttctttccttcagtacgagatcttctagataccgcctcagctctgtatcgggaagccttagagtctcctgagcattgttcacctcaccatactgcactcaggcaagcaattctttgctggggggaactaatgactctagctacctgggtgggtgttaatttggaagatccagcgtctagagacctagtagtcagttatgtcaacactaatatgggcctaaagttcaggcaactcttgtggtttcacatttcttgtctcacttttggaagagaaacagttatagagtatttggtgtctttcggagtgtggattcgcactcctccagcttatagaccaccaaatgcccctatcctatcaacacttccggagactactgttgttagacgacgaggcaggtcccctagaagaagaactccctcgcctcgcagacgaaggtctcaatcgccgcgtcgcagaagatctcaatctcgggaatctcaatgttagtattccttggactcataaggtggggaactttactgggctttattcttctactgtacctgtctttaatcctcattggaaaacaccatcttttcctaatatacatttacaccaagacattatcaaaaaatgtgaacagtttgtaggcccactcacagttaatgagaaaagaagattgcaattgattatgcctgccaggttttatccaaaggttaccaaatatttaccattggataagggtattaaaccttattatccagaacatctagttaatcattacttccaaactagacactatttacacactctatggaaggcgggtatattatataagagagaaacaacacatagcgcctcattttgtgggtcaccatattcttgggaacaagatctacagcatggggcagaatctttccaccagcaatcctctgggattctttcccgaccaccagttggatccagccttcagagcaaacaccgcaaatccagattgggacttcaatcccaacaaggacacctggccagacgccaacaaggtaggagctggagcattcgggctgggtttcaccccaccgcacggaggccttttggggtggagccctcaggctcagggcatactacaaactttgccagcaaatccgcctcctgcctccaccaatcgccagtcaggaaggcagcctaccccgctgtctccacctttgagaaacactcatcctcaggccatgcagtgg

SEQ ID NO: 1083 - DNA, 3182 bp, Hepatitis B virus
  source 1..3182: mol_type = genomic DNA
aattccacaacctttcaccaaactctgcaagatcccagagtgagaggcctgtatttccctgctggtggctccagttcaggagcagtaaaccctgttccgactactgcctctcccttatcgtcaatcttctcgaggattggggaccctgcgctgaacatggagaacatcacatcaggattcctaggaccccttctcgtgttacaggcggggtttttcttgttgacaagaatcctcacaataccgcagagtctagactcgtggtggacttctctcaattttctagggggaactaccgtgtgtcttggccaaaattcgcagtccccaacctccaatcactcaccaacctcctgtcctccaacttgtcctggttatcgctggatgtgtctgcggcgttttatcatcttcctcttcatcctgctgctatgcctcatcttcttgttggttcttctggactatcaaggtatgttgcccgtttgtcctctaattccaggatcctcaaccaccagcacgggaccatgccgaacctgcatgactactgctcaaggaacctctatgtatccctcctgttgctgtaccaaaccttcggacggaaattgcacctgtattcccatcccatcatcctgggctttcggaaaattcctatgggagtgggcctcagcccgtttctcctggctcagtttactagtgccatttgttcagtggttcgtagggctttcccccactgtttggctttcagttatatggatgatgtggtattgggggccaagtctgtacagcatcttgagtccctttttaccgctgttaccaattttcttttgtctttgggtatacatttaaaccctaacaaaacaaagagatggggttactctctgaattttatgggttatgtcattggaagttatgggtccttgccacaagaacacatcatacaaaaaatcaaagaatgttttagaaaacttcctattaacaggcctattgattggaaagtatgtcaacgaattgtgggtcttttgggttttgctgccccatttacacaatgtggttatcctgcgttaatgcccttgtatgcatgtattcaatctaagcaggctttcactttctcgccaacttacaaggcctttctgtgtaaacaatacctgaacctttaccccgttgcccggcaacggccaggtctgtgccaagtgtttgctgacgcaacccccactggctggggcttggtcatgggccatcagcgcgtgcgtggaaccttttcggctcctctgccgatccatactgcggaactcctagccgcttgttttgctcgcagcaggtctggagcaaacattatcgggactgataactctgttgtcctctcccgcaaatatacatcgtatccatggctgctaggctgtgctgccaactggatcctgcgcgggacgtcctttgtttacgtcccgtcggcgctgaatcctgcggacgacccttctcggggtcgcttgggactctctcgtccccttctccgtctgccgttccgaccgaccacggggcgcacctctctttacgcggactccccgtctgtgccttctcatctgccggaccgtgtgcacttcgcttcacctctgcacgtcgcatggagaccaccgtgaacgcccaccgaatgttgcccaaggtcttacataagaggactcttggactctctgcaatgtcaacgaccgaccttgaggcatacttcaaagactgtttgtttaaagactgggaggagttgggggaggagattagattaaaggtctttgtactaggaggctgtaggcataaattggtctgcgcaccagcaccatgcaactttttcacctctgcctaatcatctcttgttcatgtcctactgttcaagcctccaagctgtgccttgggtggctttggggcatggacatcgacccttataaagaatttggagctactgtggagttactctcgtttttgccttctgacttctttccttcagtacgagatcttctagataccgcctcagctctgtatcgggaagccttagagtctcctgagcattgttcacctcaccatactgcactcaggcaagcaattctttgctggggggaactaatgactctagctacctgggtgggtgttaatttggaagatccagcatctagagacctagtagtcagttatgtcaacactaatatgggcctaaagttcaggcaactcttgtggtttcacatttcttgtctcacttttggaagagaaaccgttatagagtatttggtgtctttcggagtgtggattcgcactcctccagcttatagaccaccaaatgcccctatcctatcaacacttccggaaactactgttgttagacgacgaggcaggtcccctagaagaagaactccctcgcctcgcagacgaaggtctcaatcgccgcgtcgcagaagatctcaatctcgggaacctcaatgttagtattccttggactcataaggtggggaactttactggtctttattcttctactgtacctgtctttaatcctcattggaaaacaccatcttttcctaatatacatttacaccaagacattatcaaaaaatgtgaacagtttgtaggcccacttacagttaatgagaaaagaagattgcaattgattatgcctgctaggttttatccaaaggttaccaaatatttaccattggataagggtattaaaccttattatccagaacatctagttaatcattacttccaaactagacactatttacacactctatggaaggcgggtatattatataagagagaaacaacacatagcgcctcattttgtgggtcaccatattcttgggaacaagatctacagcatggggcagaatctttccaccagcaatcctctgggattctttcccgaccaccagttggatccagccttcagagcaaacacagcaaatccagattgggacttcaatcccaacaaggacacctggccagacgccaacaaggtaggagctggagcattcgggctgggtttcaccccaccgcacggaggccttttggggtggagccctcaggctcagggcatactacaaactttgccagcaaatccgcctcctgcctccaccaatcgccagacaggaaggcagcctaccccgctgtctccacctttgagaaacactcatcctcaggccatgcagtgg

SEQ ID NO: 1084 - protein, 58 aa, synthetic construct
  VARIANT 19..25: note = any amino acid
  VARIANT 27..28: note = TR, LR or LK
  VARIANT 47..53: note = any amino acid
  VARIANT 55..56: note = TR, LR or LK
SRPGERPFQCRICMRNFSXXXXXXXHXXTHTGEKPFQCRICMRNFSXXXXXXXHXXTH

SEQ ID NO: 1085 - protein, 6 aa, synthetic construct
TGSQKP

SEQ ID NO: 1086 - protein, 9 aa, synthetic construct
TGGGGSQKP

SEQ ID NO: 1087 - RNA, 93 nt, synthetic construct
  source 1..93: mol_type = other RNA
gtttaagagctatgctggaaacagcatagcaagtttaaataaggctagtccgttatcaacttgaaaaagtggcaccgagtcggtgcttttttt

SEQ ID NO: 1088 - RNA, 80 nt, synthetic construct
  source 1..80: mol_type = other RNA
gttttagagctagaaatagcaagttaaaataaggctagtccgttatcaacttgaaaaagtggcaccgagtcggtgctttt

SEQ ID NO: 1089 - RNA, 92 nt, synthetic construct
  source 1..92: mol_type = other RNA
gtttaagagctaagctggaaacagcatagcaagtttaaataaggctagtccgttatcaacttgaaaaagtggcaccgagtcggtgctttttt

SEQ ID NO: 1090 - RNA, 93 nt, synthetic construct
  source 1..93: mol_type = other RNA
gtttaagagctaagctggaaacagcatagcaagtttaaataaggctagtccgttatcaacttgaaaaagtggcaccgagtcggtgcttttttt

SEQ ID NO: 1091 - protein, 25 aa, unidentified
  source 1..25: note = C2H2 class zinc finger protein motif
  VARIANT 2..5: note = any amino acid
  VARIANT 7..18: note = any amino acid
  VARIANT 20..24: note = any amino acid
  VARIANT 4..5: note = residues may be deleted
  VARIANT 23..24: note = residues may be deleted
CXXXXCXXXXXXXXXXXXHXXXXXH

SEQ ID NO: 1092 - protein, 80 aa, synthetic construct
GGPSSGAPPPSGGSPAGSPTSTEEGTSESATPESGPGTSTEPSEGSAPGSPAGSPTSTEEGTSTEPSEGSAPGTSTEPSE

SEQ ID NO: 1093 - RNA, 112 nt, synthetic construct
  source 1..112: mol_type = other RNA
cctgctggtggctccagttcgtttaagagctaagctggaaacagcatagcaagtttaaataaggctagtccgttatcaacttgaaaaagtggcaccgagtcggtgctttttt

SEQ ID NO: 1094 - RNA, 112 nt, synthetic construct
  source 1..112: mol_type = other RNA
ctgaactggagccaccagcagtttaagagctaagctggaaacagcatagcaagtttaaataaggctagtccgttatcaacttgaaaaagtggcaccgagtcggtgctttttt

SEQ ID NO: 1095 - RNA, 112 nt, synthetic construct
  source 1..112: mol_type = other RNA
cctgaactggagccaccagcgtttaagagctaagctggaaacagcatagcaagtttaaataaggctagtccgttatcaacttgaaaaagtggcaccgagtcggtgctttttt

SEQ ID NO: 1096 - RNA, 112 nt, synthetic construct
  source 1..112: mol_type = other RNA
cctcgagaagattgacgatagtttaagagctaagctggaaacagcatagcaagtttaaataaggctagtccgttatcaacttgaaaaagtggcaccgagtcggtgctttttt

SEQ ID NO: 1097 - RNA, 112 nt, synthetic construct
  source 1..112: mol_type = other RNA
tcgtcaatcttctcgaggatgtttaagagctaagctggaaacagcatagcaagtttaaataaggctagtccgttatcaacttgaaaaagtggcaccgagtcggtgctttttt

SEQ ID NO: 1098 - RNA, 112 nt, synthetic construct
  source 1..112: mol_type = other RNA
cgtcaatcttctcgaggattgtttaagagctaagctggaaacagcatagcaagtttaaataaggctagtccgttatcaacttgaaaaagtggcaccgagtcggtgctttttt

SEQ ID NO: 1099 - RNA, 112 nt, synthetic construct
  source 1..112: mol_type = other RNA
gtcaatcttctcgaggattggtttaagagctaagctggaaacagcatagcaagtttaaataaggctagtccgttatcaacttgaaaaagtggcaccgagtcggtgctttttt

SEQ ID NO: 1100 - RNA, 112 nt, synthetic construct
  source 1..112: mol_type = other RNA
aacatggagaacatcacatcgtttaagagctaagctggaaacagcatagcaagtttaaataaggctagtccgttatcaacttgaaaaagtggcaccgagtcggtgctttttt

SEQ ID NO: 1101 - RNA, 112 nt, synthetic construct
  source 1..112: mol_type = other RNA
aacatcacatcaggattcctgtttaagagctaagctggaaacagcatagcaagtttaaataaggctagtccgttatcaacttgaaaaagtggcaccgagtcggtgctttttt

SEQ ID NO: 1102 - RNA, 112 nt, synthetic construct
  source 1..112: mol_type = other RNA
ctagactctgcggtattgtggtttaagagctaagctggaaacagcatagcaagtttaaataaggctagtccgttatcaacttgaaaaagtggcaccgagtcggtgctttttt

SEQ ID NO: 1103 - RNA, 112 nt, synthetic construct
  source 1..112: mol_type = other RNA
taccgcagagtctagactcggtttaagagctaagctggaaacagcatagcaagtttaaataaggctagtccgttatcaacttgaaaaagtggcaccgagtcggtgctttttt

SEQ ID NO: 1104 - RNA, 112 nt, synthetic construct
  source 1..112: mol_type = other RNA
cgcagagtctagactcgtgggtttaagagctaagctggaaacagcatagcaagtttaaataaggctagtccgttatcaacttgaaaaagtggcaccgagtcggtgctttttt

SEQ ID NO: 1105 - RNA, 112 nt, synthetic construct
  source 1..112: mol_type = other RNA
caccacgagtctagactctggtttaagagctaagctggaaacagcatagcaagtttaaataaggctagtccgttatcaacttgaaaaagtggcaccgagtcggtgctttttt

SEQ ID NO: 1106 - RNA, 112 nt, synthetic construct
  source 1..112: mol_type = other RNA
tggacttctctcaattttctgtttaagagctaagctggaaacagcatagcaagtttaaataaggctagtccgttatcaacttgaaaaagtggcaccgagtcggtgctttttt

SEQ ID NO: 1107 - RNA, 112 nt, synthetic construct
  source 1..112: mol_type = other RNA
ggacttctctcaattttctagtttaagagctaagctggaaacagcatagcaagtttaaataaggctagtccgttatcaacttgaaaaagtggcaccgagtcggtgctttttt

SEQ ID NO: 1108 - RNA, 112 nt, synthetic construct
  source 1..112: mol_type = other RNA
gacttctctcaattttctaggtttaagagctaagctggaaacagcatagcaagtttaaataaggctagtccgttatcaacttgaaaaagtggcaccgagtcggtgctttttt

SEQ ID NO: 1109 - RNA, 112 nt, synthetic construct
  source 1..112: mol_type = other RNA
acttctctcaattttctagggtttaagagctaagctggaaacagcatagcaagtttaaataaggctagtccgttatcaacttgaaaaagtggcaccgagtcggtgctttttt

SEQ ID NO: 1110 - RNA, 112 nt, synthetic construct
  source 1..112: mol_type = other RNA
cgaattttggccaagacacagtttaagagctaagctggaaacagcatagcaagtttaaataaggctagtccgttatcaacttgaaaaagtggcaccgagtcggtgctttttt

SEQ ID NO: 1111 - RNA, 112 nt, synthetic construct
  source 1..112: mol_type = other RNA
aggttggggactgcgaatttgtttaagagctaagctggaaacagcatagcaagtttaaataaggctagtccgttatcaacttgaaaaagtggcaccgagtcggtgctttttt

SEQ ID NO: 1112 - RNA, 112 nt, synthetic construct
  source 1..112: mol_type = other RNA
ggcatagcagcaggatgaaggtttaagagctaagctggaaacagcatagcaagtttaaataaggctagtccgttatcaacttgaaaaagtggcaccgagtcggtgctttttt

SEQ ID NO: 1113 - RNA, 112 nt, synthetic construct
  source 1..112: mol_type = other RNA
agaagatgaggcatagcagcgtttaagagctaagctggaaacagcatagcaagtttaaataaggctagtccgttatcaacttgaaaaagtggcaccgagtcggtgctttttt

SEQ ID NO: 1114 - RNA, 112 nt, synthetic construct
  source 1..112: mol_type = other RNA
gctatgcctcatcttcttgtgtttaagagctaagctggaaacagcatagcaagtttaaataaggctagtccgttatcaacttgaaaaagtggcaccgagtcggtgctttttt

SEQ ID NO: 1115 - RNA, 112 nt, synthetic construct
  source 1..112: mol_type = other RNA
gaagaaccaacaagaagatggtttaagagctaagctggaaacagcatagcaagtttaaataaggctagtccgttatcaacttgaaaaagtggcaccgagtcggtgctttttt

SEQ ID NO: 1116 - RNA, 112 nt, synthetic construct
  source 1..112: mol_type = other RNA
catcttcttgttggttcttcgtttaagagctaagctggaaacagcatagcaagtttaaataaggctagtccgttatcaacttgaaaaagtggcaccgagtcggtgctttttt

SEQ ID NO: 1117 - RNA, 112 nt, synthetic construct
  source 1..112: mol_type = other RNA
cccgtttgtcctctaattccgtttaagagctaagctggaaacagcatagcaagtttaaataaggctagtccgttatcaacttgaaaaagtggcaccgagtcggtgctttttt

SEQ ID NO: 1118 - RNA, 112 nt, synthetic construct
  source 1..112: mol_type = other RNA
cctggaattagaggacaaacgtttaagagctaagctggaaacagcatagcaagtttaaataaggctagtccgttatcaacttgaaaaagtggcaccgagtcggtgctttttt

SEQ ID NO: 1119 - RNA, 112 nt, synthetic construct
  source 1..112: mol_type = other RNA
tcctggaattagaggacaaagtttaagagctaagctggaaacagcatagcaagtttaaataaggctagtccgttatcaacttgaaaaagtggcaccgagtcggtgctttttt

SEQ ID NO: 1120 - RNA, 112 nt, synthetic construct
  source 1..112: mol_type = other RNA
tactagtgccatttgttcaggtttaagagctaagctggaaacagcatagcaagtttaaataaggctagtccgttatcaacttgaaaaagtggcaccgagtcggtgctttttt

SEQ ID NO: 1121 - RNA, 112 nt, synthetic construct
  source 1..112: mol_type = other RNA
ccatttgttcagtggttcgtgtttaagagctaagctggaaacagcatagcaagtttaaataaggctagtccgttatcaacttgaaaaagtggcaccgagtcggtgctttttt

SEQ ID NO: 1122 - RNA, 112 nt, synthetic construct
  source 1..112: mol_type = other RNA
catttgttcagtggttcgtagtttaagagctaagctggaaacagcatagcaagtttaaataaggctagtccgttatcaacttgaaaaagtggcaccgagtcggtgctttttt

SEQ ID NO: 1123 - RNA, 112 nt, synthetic construct
  source 1..112: mol_type = other RNA
cctacgaaccactgaacaaagtttaagagctaagctggaaacagcatagcaagtttaaataaggctagtccgttatcaacttgaaaaagtggcaccgagtcggtgctttttt

SEQ ID NO: 1124 - RNA, 112 nt, synthetic construct
  source 1..112: mol_type = other RNA
tttcagttatatggatgatggtttaagagctaagctggaaacagcatagcaagtttaaataaggctagtccgttatcaacttgaaaaagtggcaccgagtcggtgctttttt

SEQ ID NO: 1125 - RNA, 112 nt, synthetic construct
  source 1..112: mol_type = other RNA
caaaagaaaattggtaacaggtttaagagctaagctggaaacagcatagcaagtttaaataaggctagtccgttatcaacttgaaaaagtggcaccgagtcggtgctttttt

SEQ ID NO: 1126 - RNA, 112 nt, synthetic construct
  source 1..112: mol_type = other RNA
taccaattttcttttgtcttgtttaagagctaagctggaaacagcatagcaagtttaaataaggctagtccgttatcaacttgaaaaagtggcaccgagtcggtgctttttt

SEQ ID NO: 1127 - RNA, 112 nt, synthetic construct
  source 1..112: mol_type = other RNA
accaattttcttttgtctttgtttaagagctaagctggaaacagcatagcaagtttaaataaggctagtccgttatcaacttgaaaaagtggcaccgagtcggtgctttttt

SEQ ID NO: 1128 - RNA, 112 nt, synthetic construct
  source 1..112: mol_type = other RNA
acccaaagacaaaagaaaatgtttaagagctaagctggaaacagcatagcaagtttaaataaggctagtccgttatcaacttgaaaaagtggcaccgagtcggtgctttttt

SEQ ID NO: 1129 - RNA, 112 nt, synthetic construct
  source 1..112: mol_type = other RNA
tgacatactttccaatcaatgtttaagagctaagctggaaacagcatagcaagtttaaataaggctagtccgttatcaacttgaaaaagtggcaccgagtcggtgctttttt

SEQ ID NO: 1130 - RNA, 112 nt, synthetic construct
  source 1..112: mol_type = other RNA
cactttctcgccaacttacagtttaagagctaagctggaaacagcatagcaagtttaaataaggctagtccgttatcaacttgaaaaagtggcaccgagtcggtgctttttt

SEQ ID NO: 1131 - RNA, 112 nt, synthetic construct
  source 1..112: mol_type = other RNA
cacagaaaggccttgtaagtgtttaagagctaagctggaaacagcatagcaagtttaaataaggctagtccgttatcaacttgaaaaagtggcaccgagtcggtgctttttt

SEQ ID NO: 1132 - RNA, 112 nt, synthetic construct
  source 1..112: mol_type = other RNA
tgaacctttaccccgttgccgtttaagagctaagctggaaacagcatagcaagtttaaataaggctagtccgttatcaacttgaaaaagtggcaccgagtcggtgctttttt

SEQ ID NO: 1133 - RNA, 112 nt, synthetic construct
  source 1..112: mol_type = other RNA
gggcaacggggtaaaggttcgtttaagagctaagctggaaacagcatagcaagtttaaataaggctagtccgttatcaacttgaaaaagtggcaccgagtcggtgctttttt

SEQ ID NO: 1134 - RNA, 112 nt, synthetic construct
  source 1..112: mol_type = other RNA
tttaccccgttgcccggcaagtttaagagctaagctggaaacagcatagcaagtttaaataaggctagtccgttatcaacttgaaaaagtggcaccgagtcggtgctttttt

SEQ ID NO: 1135 - RNA, 112 nt, synthetic construct
  source 1..112: mol_type = other RNA
gttgccgggcaacggggtaagtttaagagctaagctggaaacagcatagcaagtttaaataaggctagtccgttatcaacttgaaaaagtggcaccgagtcggtgctttttt

SEQ ID NO: 1136 - RNA, 112 nt, synthetic construct
  source 1..112: mol_type = other RNA
cccgttgcccggcaacggccgtttaagagctaagctggaaacagcatagcaagtttaaataaggctagtccgttatcaacttgaaaaagtggcaccgagtcggtgctttttt

SEQ ID NO: 1137 - RNA, 112 nt, synthetic construct
  source 1..112: mol_type = other RNA
ctggccgttgccgggcaacggtttaagagctaagctggaaacagcatagcaagtttaaataaggctagtccgttatcaacttgaaaaagtggcaccgagtcggtgctttttt

SEQ ID NO: 1138 - RNA, 112 nt, synthetic construct
  source 1..112: mol_type = other RNA
cctggccgttgccgggcaacgtttaagagctaagctggaaacagcatagcaagtttaaataaggctagtccgttatcaacttgaaaaagtggcaccgagtcggtgctttttt

SEQ ID NO: 1139 - RNA, 112 nt, synthetic construct
  source 1..112: mol_type = other RNA
acctggccgttgccgggcaagtttaagagctaagctggaaacagcatagcaagtttaaataaggctagtccgttatcaacttgaaaaagtggcaccgagtcggtgctttttt

SEQ ID NO: 1140 - RNA, 112 nt, synthetic construct
  source 1..112: mol_type = other RNA
gcacagacctggccgttgccgtttaagagctaagctggaaacagcatagcaagtttaaataaggctagtccgttatcaacttgaaaaagtggcaccgagtcggtgctttttt

SEQ ID NO: 1141 - RNA, 112 nt, synthetic construct
  source 1..112: mol_type = other RNA
ggcacagacctggccgttgcgtttaagagctaagctggaaacagcatagcaagtttaaataaggctagtccgttatcaacttgaaaaagtggcaccgagtcggtgctttttt

SEQ ID NO: 1142 - RNA, 112 nt, synthetic construct
  source 1..112: mol_type = other RNA
gcaaacacttggcacagaccgtttaagagctaagctggaaacagcatagcaagtttaaataaggctagtccgttatcaacttgaaaaagtggcaccgagtcggtgctttttt

SEQ ID NO: 1143 - RNA, 112 nt, synthetic construct
  source 1..112: mol_type = other RNA
gggttgcgtcagcaaacactgtttaagagctaagctggaaacagcatagcaagtttaaataaggctagtccgttatcaacttgaaaaagtggcaccgagtcggtgctttttt

SEQ ID NO: 1144 - RNA, 112 nt, synthetic construct
  source 1..112: mol_type = other RNA
tttgctgacgcaacccccacgtttaagagctaagctggaaacagcatagcaagtttaaataaggctagtccgttatcaacttgaaaaagtggcaccgagtcggtgctttttt

SEQ ID NO: 1145 - RNA, 112 nt, synthetic construct
  source 1..112: mol_type = other RNA
ctgacgcaacccccactggcgtttaagagctaagctggaaacagcatagcaagtttaaataaggctagtccgttatcaacttgaaaaagtggcaccgagtcggtgctttttt

SEQ ID NO: 1146 - RNA, 112 nt, synthetic construct
  source 1..112: mol_type = other RNA
tgacgcaacccccactggctgtttaagagctaagctggaaacagcatagcaagtttaaataaggctagtccgttatcaacttgaaaaagtggcaccgagtcggtgctttttt

SEQ ID NO: 1147 - RNA, 112 nt, synthetic construct
  source 1..112: mol_type = other RNA
gacgcaacccccactggctggtttaagagctaagctggaaacagcatagcaagtttaaataaggctagtccgttatcaacttgaaaaagtggcaccgagtcggtgctttttt

SEQ ID NO: 1148 - RNA, 112 nt, synthetic construct
  source 1..112: mol_type = other RNA
aacccccactggctggggctgtttaagagctaagctggaaacagcatagcaagtttaaataaggctagtccgttatcaacttgaaaaagtggcaccgagtcggtgctttttt

SEQ ID NO: 1149 - RNA, 112 nt, synthetic construct
  source 1..112: mol_type = other RNA
tcctctgccgatccatactggtttaagagctaagctggaaacagcatagcaagtttaaataaggctagtccgttatcaacttgaaaaagtggcaccgagtcggtgctttttt

SEQ ID NO: 1150 - RNA, 112 nt, synthetic construct
  source 1..112: mol_type = other RNA
tccgcagtatggatcggcaggtttaagagctaagctggaaacagcatagcaagtttaaataaggctagtccgttatcaacttgaaaaagtggcaccgagtcggtgctttttt

SEQ ID NO: 1151 - RNA, 112 nt, synthetic construct
  source 1..112: mol_type = other RNA
aggagttccgcagtatggatgtttaagagctaagctggaaacagcatagcaagtttaaataaggctagtccgttatcaacttgaaaaagtggcaccgagtcggtgctttttt

SEQ ID NO: 1152 - RNA, 112 nt, synthetic construct
  source 1..112: mol_type = other RNA
cggctaggagttccgcagtagtttaagagctaagctggaaacagcatagcaagtttaaataaggctagtccgttatcaacttgaaaaagtggcaccgagtcggtgctttttt

SEQ ID NO: 1153 - RNA, 112 nt, synthetic construct
  source 1..112: mol_type = other RNA
tgcgagcaaaacaagcggctgtttaagagctaagctggaaacagcatagcaagtttaaataaggctagtccgttatcaacttgaaaaagtggcaccgagtcggtgctttttt

SEQ ID NO: 1154 - RNA, 112 nt, synthetic construct
  source 1..112: mol_type = other RNA
ccgcttgttttgctcgcagcgtttaagagctaagctggaaacagcatagcaagtttaaataaggctagtccgttatcaacttgaaaaagtggcaccgagtcggtgctttttt

SEQ ID NO: 1155 - RNA, 112 nt, synthetic construct
  source 1..112: mol_type = other RNA
cctgctgcgagcaaaacaaggtttaagagctaagctggaaacagcatagcaagtttaaataaggctagtccgttatcaacttgaaaaagtggcaccgagtcggtgctttttt

SEQ ID NO: 1156 - RNA, 112 nt, synthetic construct
  source 1..112: mol_type = other RNA
tgttttgctcgcagcaggtcgtttaagagctaagctggaaacagcatagcaagtttaaataaggctagtccgttatcaacttgaaaaagtggcaccgagtcggtgctttttt

SEQ ID NO: 1157 - RNA, 112 nt, synthetic construct
  source 1..112: mol_type = other RNA
gcagcacagcctagcagccagtttaagagctaagctggaaacagcatagcaagtttaaataaggctagtccgttatcaacttgaaaaagtggcaccgagtcggtgctttttt

SEQ ID NO: 1158 - RNA, 112 nt, synthetic construct
  source 1..112: mol_type = other RNA
tgctaggctgtgctgccaacgtttaagagctaagctggaaacagcatagcaagtttaaataaggctagtccgttatcaacttgaaaaagtggcaccgagtcggtgctttttt

SEQ ID NO: 1159 - RNA, 112 nt, synthetic construct
  source 1..112: mol_type = other RNA
gctgccaactggatcctgcggtttaagagctaagctggaaacagcatagcaagtttaaataaggctagtccgttatcaacttgaaaaagtggcaccgagtcggtgctttttt

SEQ ID NO: 1160 - RNA, 112 nt, synthetic construct
  source 1..112: mol_type = other RNA
ctgccaactggatcctgcgcgtttaagagctaagctggaaacagcatagcaagtttaaataaggctagtccgttatcaacttgaaaaagtggcaccgagtcggtgctttttt

SEQ ID NO: 1161 - RNA, 112 nt, synthetic construct
  source 1..112: mol_type = other RNA
cgtcccgcgcaggatccagtgtttaagagctaagctggaaacagcatagcaagtttaaataaggctagtccgttatcaacttgaaaaagtggcaccgagtcggtgctttttt

SEQ ID NO: 1162 - RNA, 112 nt, synthetic construct
  source 1..112: mol_type = other RNA
aaacaaaggacgtcccgcgcgtttaagagctaagctggaaacagcatagcaagtttaaataaggctagtccgttatcaacttgaaaaagtggcaccgagtcggtgctttttt

SEQ ID NO: 1163 - RNA, 112 nt, synthetic construct
  source 1..112: mol_type = other RNA
gtcctttgtttacgtcccgtgtttaagagctaagctggaaacagcatagcaagtttaaataaggctagtccgttatcaacttgaaaaagtggcaccgagtcggtgctttttt

SEQ ID NO: 1164 - RNA, 112 nt, synthetic construct
  source 1..112: mol_type = other RNA
cgccgacgggacgtaaacaagtttaagagctaagctggaaacagcatagcaagtttaaataaggctagtccgttatcaacttgaaaaagtggcaccgagtcggtgctttttt

SEQ ID NO: 1165 - RNA, 112 nt, synthetic construct
  source 1..112: mol_type = other RNA
tgccgttccgaccgaccacggtttaagagctaagctggaaacagcatagcaagtttaaataaggctagtccgttatcaacttgaaaaagtggcaccgagtcggtgctttttt

SEQ ID NO: 1166 - RNA, 112 nt, synthetic construct
  source 1..112: mol_type = other RNA
aggtgcgccccgtggtcggtgtttaagagctaagctggaaacagcatagcaagtttaaataaggctagtccgttatcaacttgaaaaagtggcaccgagtcggtgctttttt

SEQ ID NO: 1167 - RNA, 112 nt, synthetic construct
  source 1..112: mol_type = other RNA
agagaggtgcgccccgtggtgtttaagagctaagctggaaacagcatagcaagtttaaataaggctagtccgttatcaacttgaaaaagtggcaccgagtcggtgctttttt

SEQ ID NO: 1168 - RNA, 112 nt, synthetic construct
  source 1..112: mol_type = other RNA
gtaaagagaggtgcgccccggtttaagagctaagctggaaacagcatagcaagtttaaataaggctagtccgttatcaacttgaaaaagtggcaccgagtcggtgctttttt

SEQ ID NO: 1169 - RNA, 112 nt, synthetic construct
  source 1..112: mol_type = other RNA
ggggcgcacctctctttacggtttaagagctaagctggaaacagcatagcaagtttaaataaggctagtccgttatcaacttgaaaaagtggcaccgagtcggtgctttttt

SEQ ID NO: 1170 - RNA, 112 nt, synthetic construct
  source 1..112: mol_type = other RNA
cggggagtccgcgtaaagaggtttaagagctaagctggaaacagcatagcaagtttaaataaggctagtccgttatcaacttgaaaaagtggcaccgagtcggtgctttttt

SEQ ID NO: 1171 - RNA, 112 nt, synthetic construct
  source 1..112: mol_type = other RNA
cagatgagaaggcacagacggtttaagagctaagctggaaacagcatagcaagtttaaataaggctagtccgttatcaacttgaaaaagtggcaccgagtcggtgctttttt

SEQ ID NO: 1172 - RNA, 112 nt, synthetic construct
  source 1..112: mol_type = other RNA
gtctgtgccttctcatctgcgtttaagagctaagctggaaacagcatagcaagtttaaataaggctagtccgttatcaacttgaaaaagtggcaccgagtcggtgctttttt

SEQ ID NO: 1173 - RNA, 112 nt, synthetic construct
  source 1..112: mol_type = other RNA
ggcagatgagaaggcacagagtttaagagctaagctggaaacagcatagcaagtttaaataaggctagtccgttatcaacttgaaaaagtggcaccgagtcggtgctttttt

SEQ ID NO: 1174 - RNA, 112 nt, synthetic construct
  source 1..112: mol_type = other RNA
gcagatgagaaggcacagacgtttaagagctaagctggaaacagcatagcaagtttaaataaggctagtccgttatcaacttgaaaaagtggcaccgagtcggtgctttttt

SEQ ID NO: 1175 - RNA, 112 nt, synthetic construct
  source 1..112: mol_type = other RNA
acacggtccggcagatgagagtttaagagctaagctggaaacagcatagcaagtttaaataaggctagtccgttatcaacttgaaaaagtggcaccgagtcggtgctttttt

SEQ ID NO: 1176 - RNA, 112 nt, synthetic construct
  source 1..112: mol_type = other RNA
gaagcgaagtgcacacggtcgtttaagagctaagctggaaacagcatagcaagtttaaataaggctagtccgttatcaacttgaaaaagtggcaccgagtcggtgctttttt

SEQ ID NO: 1177 - RNA, 112 nt, synthetic construct
  source 1..112: mol_type = other RNA
gaggtgaagcgaagtgcacagtttaagagctaagctggaaacagcatagcaagtttaaataaggctagtccgttatcaacttgaaaaagtggcaccgagtcggtgctttttt

SEQ ID NO: 1178 - RNA, 112 nt, synthetic construct
  source 1..112: mol_type = other RNA
cttcacctctgcacgtcgcagtttaagagctaagctggaaacagcatagcaagtttaaataaggctagtccgttatcaacttgaaaaagtggcaccgagtcggtgctttttt

SEQ ID NO: 1179 - RNA, 112 nt, synthetic construct
  source 1..112: mol_type = other RNA
ggtctccatgcgacgtgcaggtttaagagctaagctggaaacagcatagcaagtttaaataaggctagtccgttatcaacttgaaaaagtggcaccgagtcggtgctttttt

SEQ ID NO: 1180 - RNA, 112 nt, synthetic construct
  source 1..112: mol_type = other RNA
tgcccaaggtcttacataaggtttaagagctaagctggaaacagcatagcaagtttaaataaggctagtccgttatcaacttgaaaaagtggcaccgagtcggtgctttttt

SEQ ID NO: 1181 - RNA, 112 nt, synthetic construct
  source 1..112: mol_type = other RNA
gtcctcttatgtaagaccttgtttaagagctaagctggaaacagcatagcaagtttaaataaggctagtccgttatcaacttgaaaaagtggcaccgagtcggtgctttttt

SEQ ID NO: 1182 - RNA, 112 nt, synthetic construct
  source 1..112: mol_type = other RNA
agtcctcttatgtaagacctgtttaagagctaagctggaaacagcatagcaagtttaaataaggctagtccgttatcaacttgaaaaagtggcaccgagtcggtgctttttt

SEQ ID NO: 1183 - RNA, 112 nt, synthetic construct
  source 1..112: mol_type = other RNA
gtcttacataagaggactctgtttaagagctaagctggaaacagcatagcaagtttaaataaggctagtccgttatcaacttgaaaaagtggcaccgagtcggtgctttttt

SEQ ID NO: 1184 - RNA, 112 nt, synthetic construct
  source 1..112: mol_type = other RNA
aatgtcaacgaccgaccttggtttaagagctaagctggaaacagcatagcaagtttaaataaggctagtccgttatcaacttgaaaaagtggcaccgagtcggtgctttttt

SEQ ID NO: 1185 - RNA, 112 nt, synthetic construct
  source 1..112: mol_type = other RNA
tttgaagtatgcctcaaggtgtttaagagctaagctggaaacagcatagcaagtttaaataaggctagtccgttatcaacttgaaaaagtggcaccgagtcggtgctttttt

SEQ ID NO: 1186 - RNA, 112 nt, synthetic construct
  source 1..112: mol_type = other RNA
agtctttgaagtatgcctcagtttaagagctaagctggaaacagcatagcaagtttaaataaggctagtccgttatcaacttgaaaaagtggcaccgagtcggtgctttttt

SEQ ID NO: 1187 - RNA, 112 nt, synthetic construct
  source 1..112: mol_type = other RNA
aagactgtttgtttaaagacgtttaagagctaagctggaaacagcatagcaagtttaaataaggctagtccgttatcaacttgaaaaagtggcaccgagtcggtgctttttt

SEQ ID NO: 1188 - RNA, 112 nt, synthetic construct
  source 1..112: mol_type = other RNA
agactgtttgtttaaagactgtttaagagctaagctggaaacagcatagcaagtttaaataaggctagtccgttatcaacttgaaaaagtggcaccgagtcggtgctttttt

SEQ ID NO: 1189 - RNA, 112 nt, synthetic construct
  source 1..112: mol_type = other RNA
ctgtttgtttaaagactggggtttaagagctaagctggaaacagcatagcaagtttaaataaggctagtccgttatcaacttgaaaaagtggcaccgagtcggtgctttttt

SEQ ID NO: 1190 - RNA, 112 nt, synthetic construct
  source 1..112: mol_type = other RNA
gtttaaagactgggaggagtgtttaagagctaagctggaaacagcatagcaagtttaaataaggctagtccgttatcaacttgaaaaagtggcaccgagtcggtgctttttt

SEQ ID NO: 1191 - RNA, 112 nt, synthetic construct
  source 1..112: mol_type = other RNA
tctttgtactaggaggctgtgtttaagagctaagctggaaacagcatagcaagtttaaataaggctagtccgttatcaacttgaaaaagtggcaccgagtcggtgctttttt

SEQ ID NO: 1192 - RNA, 112 nt, synthetic construct
  source 1..112: mol_type = other RNA
aggaggctgtaggcataaatgtttaagagctaagctggaaacagcatagcaagtttaaataaggctagtccgttatcaacttgaaaaagtggcaccgagtcggtgctttttt

SEQ ID NO: 1193 - RNA, 112 nt, synthetic construct
  source 1..112: mol_type = other RNA
gtgaaaaagttgcatggtgcgtttaagagctaagctggaaacagcatagcaagtttaaataaggctagtccgttatcaacttgaaaaagtggcaccgagtcggtgctttttt

SEQ ID NO: 1194 - RNA, 112 nt, synthetic construct
  source 1..112: mol_type = other RNA
gcagaggtgaaaaagttgcagtttaagagctaagctggaaacagcatagcaagtttaaataaggctagtccgttatcaacttgaaaaagtggcaccgagtcggtgctttttt

SEQ ID NO: 1195 - RNA, 112 nt, synthetic construct
  source 1..112: mol_type = other RNA
aacaagagatgattaggcaggtttaagagctaagctggaaacagcatagcaagtttaaataaggctagtccgttatcaacttgaaaaagtggcaccgagtcggtgctttttt

SEQ ID NO: 1196 - RNA, 112 nt, synthetic construct
  source 1..112: mol_type = other RNA
gacatgaacaagagatgattgtttaagagctaagctggaaacagcatagcaagtttaaataaggctagtccgttatcaacttgaaaaagtggcaccgagtcggtgctttttt

SEQ ID NO: 1197 - RNA, 112 nt, synthetic construct
  source 1..112: mol_type = other RNA
agcttggaggcttgaacagtgtttaagagctaagctggaaacagcatagcaagtttaaataaggctagtccgttatcaacttgaaaaagtggcaccgagtcggtgctttttt

SEQ ID NO: 1198 - RNA, 112 nt, synthetic construct
  source 1..112: mol_type = other RNA
caagcctccaagctgtgcctgtttaagagctaagctggaaacagcatagcaagtttaaataaggctagtccgttatcaacttgaaaaagtggcaccgagtcggtgctttttt

SEQ ID NO: 1199 - RNA, 112 nt, synthetic construct
  source 1..112: mol_type = other RNA
aagcctccaagctgtgccttgtttaagagctaagctggaaacagcatagcaagtttaaataaggctagtccgttatcaacttgaaaaagtggcaccgagtcggtgctttttt

SEQ ID NO: 1200 - RNA, 112 nt, synthetic construct
  source 1..112: mol_type = other RNA
cctccaagctgtgccttggggtttaagagctaagctggaaacagcatagcaagtttaaataaggctagtccgttatcaacttgaaaaagtggcaccgagtcggtgctttttt

SEQ ID NO: 1201 - RNA, 112 nt, synthetic construct
  source 1..112: mol_type = other RNA
ccacccaaggcacagcttgggtttaagagctaagctggaaacagcatagcaagtttaaataaggctagtccgttatcaacttgaaaaagtggcaccgagtcggtgctttttt

SEQ ID NO: 1202 - RNA, 112 nt, synthetic construct
  source 1..112: mol_type = other RNA
agctgtgccttgggtggcttgtttaagagctaagctggaaacagcatagcaagtttaaataaggctagtccgttatcaacttgaaaaagtggcaccgagtcggtgctttttt

SEQ ID NO: 1203 - RNA, 112 nt, synthetic construct
  source 1..112: mol_type = other RNA
aagccacccaaggcacagctgtttaagagctaagctggaaacagcatagcaagtttaaataaggctagtccgttatcaacttgaaaaagtggcaccgagtcggtgctttttt

SEQ ID NO: 1204 - RNA, 112 nt, synthetic construct
  source 1..112: mol_type = other RNA
gctgtgccttgggtggctttgtttaagagctaagctggaaacagcatagcaagtttaaataaggctagtccgttatcaacttgaaaaagtggcaccgagtcggtgctttttt

SEQ ID NO: 1205 - RNA, 112 nt, synthetic construct
  source 1..112: mol_type = other RNA
ctgtgccttgggtggctttggtttaagagctaagctggaaacagcatagcaagtttaaataaggctagtccgttatcaacttgaaaaagtggcaccgagtcggtgctttttt

SEQ ID NO: 1206 - RNA, 112 nt, synthetic construct
  source 1..112: mol_type = other RNA
tagctccaaattctttataagtttaagagctaagctggaaacagcatagcaagtttaaataaggctagtccgttatcaacttgaaaaagtggcaccgagtcggtgctttttt

SEQ ID NO: 1207 - RNA, 112 nt, synthetic construct
  source 1..112: mol_type = other RNA
gtagctccaaattctttatagtttaagagctaagctggaaacagcatagcaagtttaaataaggctagtccgttatcaacttgaaaaagtggcaccgagtcggtgctttttt

SEQ ID NO: 1208 - RNA, 112 nt, synthetic construct
  source 1..112: mol_type = other RNA
taaagaatttggagctactggtttaagagctaagctggaaacagcatagcaagtttaaataaggctagtccgttatcaacttgaaaaagtggcaccgagtcggtgctttttt

SEQ ID NO: 1209 - RNA, 112 nt, synthetic construct
  source 1..112: mol_type = other RNA
atgactctagctacctgggtgtttaagagctaagctggaaacagcatagcaagtttaaataaggctagtccgttatcaacttgaaaaagtggcaccgagtcggtgctttttt

SEQ ID NO: 1210 - RNA, 112 nt, synthetic construct
  source 1..112: mol_type = other RNA
cacatttcttgtctcactttgtttaagagctaagctggaaacagcatagcaagtttaaataaggctagtccgttatcaacttgaaaaagtggcaccgagtcggtgctttttt

SEQ ID NO: 1211 - RNA, 112 nt, synthetic construct
  source 1..112: mol_type = other RNA
tagtttccggaagtgttgatgtttaagagctaagctggaaacagcatagcaagtttaaataaggctagtccgttatcaacttgaaaaagtggcaccgagtcggtgctttttt

SEQ ID NO: 1212 - RNA, 112 nt, synthetic construct
  source 1..112: mol_type = other RNA
cgtctaacaacagtagtttcgtttaagagctaagctggaaacagcatagcaagtttaaataaggctagtccgttatcaacttgaaaaagtggcaccgagtcggtgctttttt

SEQ ID NO: 1213 - RNA, 112 nt, synthetic construct
  source 1..112: mol_type = other RNA
actactgttgttagacgacggtttaagagctaagctggaaacagcatagcaagtttaaataaggctagtccgttatcaacttgaaaaagtggcaccgagtcggtgctttttt

SEQ ID NO: 1214 - RNA, 112 nt, synthetic construct
  source 1..112: mol_type = other RNA
ctgttgttagacgacgaggcgtttaagagctaagctggaaacagcatagcaagtttaaataaggctagtccgttatcaacttgaaaaagtggcaccgagtcggtgctttttt

SEQ ID NO: 1215 - RNA, 112 nt, synthetic construct
  source 1..112: mol_type = other RNA
cgagggagttcttcttctaggtttaagagctaagctggaaacagcatagcaagtttaaataaggctagtccgttatcaacttgaaaaagtggcaccgagtcggtgctttttt

SEQ ID NO: 1216 - RNA, 112 nt, synthetic construct
  source 1..112: mol_type = other RNA
gcgagggagttcttcttctagtttaagagctaagctggaaacagcatagcaagtttaaataaggctagtccgttatcaacttgaaaaagtggcaccgagtcggtgctttttt

SEQ ID NO: 1217 - RNA, 112 nt, synthetic construct
  source 1..112: mol_type = other RNA
ggcgagggagttcttcttctgtttaagagctaagctggaaacagcatagcaagtttaaataaggctagtccgttatcaacttgaaaaagtggcaccgagtcggtgctttttt

SEQ ID NO: 1218 - RNA, 112 nt, synthetic construct
  source 1..112: mol_type = other RNA
ctccctcgcctcgcagacgagtttaagagctaagctggaaacagcatagcaagtttaaataaggctagtccgttatcaacttgaaaaagtggcaccgagtcggtgctttttt

SEQ ID NO: 1219 - RNA, 112 nt, synthetic construct
  source 1..112: mol_type = other RNA
gaccttcgtctgcgaggcgagtttaagagctaagctggaaacagcatagcaagtttaaataaggctagtccgttatcaacttgaaaaagtggcaccgagtcggtgctttttt

SEQ ID NO: 1220 - RNA, 112 nt, synthetic construct
  source 1..112: mol_type = other RNA
agaccttcgtctgcgaggcggtttaagagctaagctggaaacagcatagcaagtttaaataaggctagtccgttatcaacttgaaaaagtggcaccgagtcggtgctttttt

SEQ ID NO: 1221 - RNA, 112 nt, synthetic construct
  source 1..112: mol_type = other RNA
gattgagaccttcgtctgcggtttaagagctaagctggaaacagcatagcaagtttaaataaggctagtccgttatcaacttgaaaaagtggcaccgagtcggtgctttttt

SEQ ID NO: 1222 - RNA, 112 nt, synthetic construct
  source 1..112: mol_type = other RNA
gattgagatcttctgcgacggtttaagagctaagctggaaacagcatagcaagtttaaataaggctagtccgttatcaacttgaaaaagtggcaccgagtcggtgctttttt

SEQ ID NO: 1223 - RNA, 112 nt, synthetic construct
  source 1..112: mol_type = other RNA
gtcgcagaagatctcaatctgtttaagagctaagctggaaacagcatagcaagtttaaataaggctagtccgttatcaacttgaaaaagtggcaccgagtcggtgctttttt

SEQ ID NO: 1224 - RNA, 112 nt, synthetic construct
  source 1..112: mol_type = other RNA
tcgcagaagatctcaatctcgtttaagagctaagctggaaacagcatagcaagtttaaataaggctagtccgttatcaacttgaaaaagtggcaccgagtcggtgctttttt

SEQ ID NO: 1225 - RNA, 112 nt, synthetic construct
  source 1..112: mol_type = other RNA
atatggtgacccacaaaatggtttaagagctaagctggaaacagcatagcaagtttaaataaggctagtccgttatcaacttgaaaaagtggcaccgagtcggtgctttttt

SEQ ID NO: 1226 - RNA, 112 nt, synthetic construct
  source 1..112: mol_type = other RNA
tttgtgggtcaccatattctgtttaagagctaagctggaaacagcatagcaagtttaaataaggctagtccgttatcaacttgaaaaagtggcaccgagtcggtgctttttt

SEQ ID NO: 1227 - RNA, 112 nt, synthetic construct
  source 1..112: mol_type = other RNA
ttgtgggtcaccatattcttgtttaagagctaagctggaaacagcatagcaagtttaaataaggctagtccgttatcaacttgaaaaagtggcaccgagtcggtgctttttt

SEQ ID NO: 1228 - RNA, 112 nt, synthetic construct
  source 1..112: mol_type = other RNA
gctggatccaactggtggtcgtttaagagctaagctggaaacagcatagcaagtttaaataaggctagtccgttatcaacttgaaaaagtggcaccgagtcggtgctttttt

SEQ ID NO: 1229 - RNA, 112 nt, synthetic construct
  source 1..112: mol_type = other RNA
caccccaaaaggcctccgtggtttaagagctaagctggaaacagcatagcaagtttaaataaggctagtccgttatcaacttgaaaaagtggcaccgagtcggtgctttttt

SEQ ID NO: 1230 - RNA, 112 nt, synthetic construct
  source 1..112: mol_type = other RNA
ccttttggggtggagccctcgtttaagagctaagctggaaacagcatagcaagtttaaataaggctagtccgttatcaacttgaaaaagtggcaccgagtcggtgctttttt

SEQ ID NO: 1231 - RNA, 112 nt, synthetic construct
  source 1..112: mol_type = other RNA
cctgagggctccaccccaaagtttaagagctaagctggaaacagcatagcaagtttaaataaggctagtccgttatcaacttgaaaaagtggcaccgagtcggtgctttttt

SEQ ID NO: 1232 - RNA, 112 nt, synthetic construct
  source 1..112: mol_type = other RNA
ggggtggagccctcaggctcgtttaagagctaagctggaaacagcatagcaagtttaaataaggctagtccgttatcaacttgaaaaagtggcaccgagtcggtgctttttt

SEQ ID NO: 1233 - RNA, 112 nt, synthetic construct
  source 1..112: mol_type = other RNA
gggtggagccctcaggctcagtttaagagctaagctggaaacagcatagcaagtttaaataaggctagtccgttatcaacttgaaaaagtggcaccgagtcggtgctttttt

SEQ ID NO: 1234 - RNA, 112 nt, synthetic construct
  source 1..112: mol_type = other RNA
cgattggtggaggcaggagggtttaagagctaagctggaaacagcatagcaagtttaaataaggctagtccgttatcaacttgaaaaagtggcaccgagtcggtgctttttt

SEQ ID NO: 1235 - RNA, 112 nt, synthetic construct
  source 1..112: mol_type = other RNA
ctcatcctcaggccatgcaggtttaagagctaagctggaaacagcatagcaagtttaaataaggctagtccgttatcaacttgaaaaagtggcaccgagtcggtgctttttt

SEQ ID NO: 1236 - DNA, 7162 bp, synthetic construct
  source 1..7162: mol_type = other DNA
cgtcgatcgacggatcgggagatctcccgatcccctatggtgcactctcagtacaatctgctctgatgccgcatagttaagccagtatctgctccctgcttgtgtgttggaggtcgctgagtagtgcgcgagcaaaatttaagctacaacaaggcaaggcttgaccgacaattgcatgaagaatctgcttagggttaggcgttttgcgctgcttcgcgatgtacgggccagatatacgcgttgacattgattattgactagttattaatagtaatcaattacggggtcattagttcatagcccatatatggagttccgcgttacataacttacggtaaatggcccgcctggctgaccgcccaacgacccccgcccattgacgtcaataatgacgtatgttcccatagtaacgccaatagggactttccattgacgtcaatgggtggagtatttacggtaaactgcccacttggcagtacatcaagtgtatcatatgccaagtacgccccctattgacgtcaatgacggtaaatggcccgcctggcattatgcccagtacatgaccttatgggactttcctacttggcagtacatctacgtattagtcatcgctattaccatggtgatgcggttttggcagtacatcaatgggcgtggatagcggtttgactcacggggatttccaagtctccaccccattgacgtcaatgggagtttgttttggcaccaaaatcaacgggactttccaaaatgtcgtaacaactccgccccattgacgcaaatgggcggtaggcgtgtacggtgggaggtctatataagcagagctctctggctaactagagaacccactgcttactggcttatcgaaattaatacgactcactataaggagacccaagctaccggtgccaccatgtacccatacgatgttccagattacgcttcgccgaagaaaaagcgcaaggtcaatcacgatcaggagttcgacccccctaaggtgtacccaccagtgcctgcagagaagaggaagccaatccgggtgctgagcctgtttgatggcatcgccaccggcctgctggtgctgaaggatctgggcatccaggtggaccggtacatcgcctccgaggtgtgcgaggattctatcaccgtgggcatggtgcgccaccagggcaagatcatgtatgtgggcgacgtgcggtccgtgacacagaagcacatccaggagtggggcccattcgatctggtgatcggcggcagcccctgtaatgacctgtccatcgtgaaccctgcaaggaagggactgtacgagggaaccggccggctgttctttgagttttatagactgctgcacgacgccaggcctaaggagggcgacgatagaccattcttttggctgttcgagaatgtggtggctatgggcgtgagcgataagagggacatctccaggtttctggagtctaaccccgtgatgatcgatgcaaaggaggtgtccgccgcacacagagccaggtatttctggggcaatctgccaggaatgaacaggccactggcaagcaccgtgaatgacaagctggagctgcaggagtgcctggagcacggaaggatcgccaagttttccaaggtgcgcacaatcaccacacggagcaattccatcaagcagggcaaggatcagcacttccccgtgttcatgaacgagaaggaggacatcctgtggtgtaccgagatggagagagtgttcggctttccagtgcactacacagacgtgtctaacatgagcaggctggcaaggcagcggctgctgggcagatcttggagcgtgcccgtgatcaggcacctgttcgcccctctgaaggagtattttgcctgcgtgagcagcggcaactccaatgccaacagccggggcccctctttcagctccggattggtgcctctgagcctgaggggctcccacatggcagcaatccccgccctggaccccgaggccgagcctagcatggacgtgatcctggtgggctctagcgagctgtcctctagcgtgtctccaggaaccggaagggatctgatcgcatacgaggtgaaggccaatcagcggaacatcgaggacatctgtatctgctgtggcagcctgcaggtgcacacacagcacccactgttcgagggaggaatctgcgcaccctgtaaggataagttcctggacgccctgtttctgtacgacgatgacggctaccagtcctattgctctatctgctgttccggcgagaccctgctgatctgcggcaatccagattgtacaaggtgctattgttttgagtgcgtggactctctggtgggaccaggcaccagcggaaaggtgcacgccatgtccaactgggtgtgctacctgtgcctgccatcctctcgcagcggactgctgcagcggagaaggaagtggagatcccagctgaaggccttctatgatagggagtctgagaaccccctggagatgtttgagaccgtgccagtgtggcgccggcagcccgtgagggtgctgagcctgttcgaggatatcaagaaggagctgacatccctgggctttctggagtccggctctgaccccggacagctgaagcacgtggtggatgtgaccgacacagtgcggaaggatgtggaggagtggggccctttcgacctggtgtacggagcaacccctccactgggacacacatgcgacagacccccttcttggtacctgttccagtttcaccgcctgctgcagtatgcaaggccaaagccaggcagccctagaccattcttttggatgttcgtggataatctggtgctgaacaaggaggatctggacgtggccagcaggtttctggagatggagccagtgaccatcccagacgtgcacggcggctccctgcagaatgccgtgcgcgtgtggtctaacatccctgccatcagaagcaggcactgggcactggtgagcgaggaggagctgtccctgctggcccagaataagcagagcagcaagctggccgccaagtggcctacaaagctggtgaagaactgcttcctgccactgcgggagtacttcaagtatttttccaccgagctgacatctagcctgggaggaccctcctctggcgccccaccacctagcggcggctcccctgccggctctccaaccagcacagaggagggcaccagcgagtccgccacaccagagtctggacctggcaccagcacagagccatccgagggctctgccccaggctctcctgcaggcagccctacctccaccgaagagggcaccagcacagagccttctgagggcagcgccccaggcacctctacagagccaagcgagctcgagtcccggccaggggaacggcccttccagtgtcggatctgcatgagaaacttttcaaagaagttcaatctccttcagcatacccggacccacactggagagaaaccctttcagtgcaggatatgtatgcggaatttttcccggcaagataatttgaattcccatttgagaacacataccgggagtcagaagcctttccaatgccggatttgcatgaggaacttctcccgaagccataatttgaaactccatactagaacacatacaggcgagaagccattccagtgtaggatctgcatgcgcaattttagccaatcaaccactcttaaacgccatctgagaacgcatacaggtagtcagaagccttttcagtgcaggatctgcatgaggaattttagtcgcaacacgaacttgactagacacacaagaacgcatactggagagaagccctttcagtgtaggatttgtatgcggaacttcagcattaaacacaacctggcaaggcatctgaggactcatttgcgcgggtctagccccaagaagaagagaaaggtgggagtcgacggatccagcggctccgagaccccaggcacatctgagagcgccacccctgagtcccggaccctggtgacattcaaggacgtgttcgtggacttcacccgggaggagtggaagctgctggacacagcccagcagatcgtgtacaggaacgtgatgctggagaactataagaatctggtgtctctgggctaccagctgacaaagccagatgtgatcctgcggctggagaagggagaggagccctggctggtgtagtctagaaatcaacctctggattacaaaatttgtgaaagattgactggtattcttaactatgttgctccttttacgctatgtggatacgctgctttaatgcctttgtatcatgctattgcttcccgtatggctttcattttctcctccttgtataaatcctggttgctgtctctttatgaggagttgtggcccgttgtcaggcaacgtggcgtggtgtgcactgtgtttgctgacgcaacccccactggttggggcattgccaccacctgtcagctcctttccgggactttcgctttccccctccctattgccacggcggaactcatcgccgcctgccttgcccgctgctggacaggggctcggctgttgggcactgacaattccgtggtgttgtcggggaaatcatcgtcctttccttggctgctcgcctgtgttgccacctggattctgcgcgggacgtccttctgctacgtcccttcggccctcaatccagcggaccttccttcccgcggcctgctgccggctctgcggcctcttccgcgtcttcgccttcgccctcagacgagtcggatctccctttgggccgcctccccgcctgttaattaaaaaaaaaaaaaaaaaaaaaaaaaaaaaaaaaaaaaaaaaaaaaaaaaaaactagtggcgcctgatgcggtattttctccttacgcatctgtgcggtatttcacaccgcataatccagcacagtggcggcccgtttaaacccgctgatcagcctcgactgtgccttctagttgccagccatctgttgtttgcccctcccccgtgccttccttgaccctggaaggtgccactcccactgtcctttcctaataaaatgaggaaattgcatcgcattgtctgagtaggtgtcattctattctggggggtggggtggggcaggacagcaagggggaggattgggaagacaatagcaggcatgctggggatgcggtgggctctatggcttctgaggcggaaagaaccagctgcattaatgaatcggccaacgcgcggggagaggcggtttgcgtattgggcgctcttccgcttcctcgctcactgactcgctgcgctcggtcgttcggctgcggcgagcggtatcagctcactcaaaggcggtaatacggttatccacagaatcaggggataacgcaggaaagaacatgtgagcaaaaggccagcaaaaggccaggaaccgtaaaaaggccgcgttgctggcgtttttccataggctccgcccccctgacgagcatcacaaaaatcgacgctcaagtcagaggtggcgaaacccgacaggactataaagataccaggcgtttccccctggaagctccctcgtgcgctctcctgttccgaccctgccgcttaccggatacctgtccgcctttctcccttcgggaagcgtggcgctttctcatagctcacgctgtaggtatctcagttcggtgtaggtcgttcgctccaagctgggctgtgtgcacgaaccccccgttcagcccgaccgctgcgccttatccggtaactatcgtcttgagtccaacccggtaagacacgacttatcgccactggcagcagccactggtaacaggattagcagagcgaggtatgtaggcggtgctacagagttcttgaagtggtggcctaactacggctacactagaagaacagtatttggtatctgcgctctgctgaagccagttaccttcggaaaaagagttggtagctcttgatccggcaaacaaaccaccgctggtagcggtttttttgtttgcaagcagcagattacgcgcagaaaaaaaggatctcaagaagatcctttgatcttttctacggggtctgacgctcagtggaacgaaaactcacgttaagggattttggtcatgagattatcaaaaaggatcttcacctagatccttttaaattaaaaatgaagttttaaatcaatctaaagtatatatgagtaaacttggtctgacagttaccaatgcttaatcagtgaggcacctatctcagcgatctgtctatttcgttcatccatagttgcctgactccccgtcgtgtagataactacgatacgggagggcttaccatctggccccagtgctgcaatgataccgcgagacccacgctcaccggctccagatttatcagcaataaaccagccagccggaagggccgagcgcagaagtggtcctgcaactttatccgcctccatccagtctattaattgttgccgggaagctagagtaagtagttcgccagttaatagtttgcgcaacgttgttgccattgctacaggcatcgtggtgtcacgctcgtcgtttggtatggcttcattcagctccggttcccaacgatcaaggcgagttacatgatcccccatgttgtgcaaaaaagcggttagctccttcggtcctccgatcgttgtcagaagtaagttggccgcagtgttatcactcatggttatggcagcactgcataattctcttactgtcatgccatccgtaagatgcttttctgtgactggtgagtactcaaccaagtcattctgagaatagtgtatgcggcgaccgagttgctcttgcccggcgtcaatacgggataataccgcgccacatagcagaactttaaaagtgctcatcattggaaaacgttcttcggggcgaaaactctcaaggatcttaccgctgttgagatccagttcgatgtaacccactcgtgcacccaactgatcttcagcatcttttactttcaccagcgtttctgggtgagcaaaaacaggaaggcaaaatgccgcaaaaaagggaataagggcgacacggaaatgttgaatactcatactcttcctttttcaatattattgaagcatttatcagggttattgtctcatgagcggatacatatttgaatgtatttagaaaaataaacaaataggggttccgcgcacatttccccgaaaagtgccacctga

SEQ ID NO: 1237 - DNA, 7162 bp, synthetic construct
  source 1..7162: mol_type = other DNA
cgtcgatcgacggatcgggagatctcccgatcccctatggtgcactctcagtacaatctgctctgatgccgcatagttaagccagtatctgctccctgcttgtgtgttggaggtcgctgagtagtgcgcgagcaaaatttaagctacaacaaggcaaggcttgaccgacaattgcatgaagaatctgcttagggttaggcgttttgcgctgcttcgcgatgtacgggccagatatacgcgttgacattgattattgactagttattaatagtaatcaattacggggtcattagttcatagcccatatatggagttccgcgttacataacttacggtaaatggcccgcctggctgaccgcccaacgacccccgcccattgacgtcaataatgacgtatgttcccatagtaacgccaatagggactttccattgacgtcaatgggtggagtatttacggtaaactgcccacttggcagtacatcaagtgtatcatatgccaagtacgccccctattgacgtcaatgacggtaaatggcccgcctggcattatgcccagtacatgaccttatgggactttcctacttggcagtacatctacgtattagtcatcgctattaccatggtgatgcggttttggcagtacatcaatgggcgtggatagcggtttgactcacggggatttccaagtctccaccccattgacgtcaatgggagtttgttttggcaccaaaatcaacgggactttccaaaatgtcgtaacaactccgccccattgacgcaaatgggcggtaggcgtgtacggtgggaggtctatataagcagagctctctggctaactagagaacccactgcttactggcttatcgaaattaatacgactcactataaggagacccaagctaccggtgccaccatgtacccatacgatgttccagattacgcttcgccgaagaaaaagcgcaaggtcaatcacgatcaggagttcgacccccctaaggtgtacccaccagtgcctgcagagaagaggaagccaatccgggtgctgagcctgtttgatggcatcgccaccggcctgctggtgctgaaggatctgggcatccaggtggaccggtacatcgcctccgaggtgtgcgaggattctatcaccgtgggcatggtgcgccaccagggcaagatcatgtatgtgggcgacgtgcggtccgtgacacagaagcacatccaggagtggggcccattcgatctggtgatcggcggcagcccctgtaatgacctgtccatcgtgaaccctgcaaggaagggactgtacgagggaaccggccggctgttctttgagttttatagactgctgcacgacgccaggcctaaggagggcgacgatagaccattcttttggctgttcgagaatgtggtggctatgggcgtgagcgataagagggacatctccaggtttctggagtctaaccccgtgatgatcgatgcaaaggaggtgtccgccgcacacagagccaggtatttctggggcaatctgccaggaatgaacaggccactggcaagcaccgtgaatgacaagctggagctgcaggagtgcctggagcacggaaggatcgccaagttttccaaggtgcgcacaatcaccacacggagcaattccatcaagcagggcaaggatcagcacttccccgtgttcatgaacgagaaggaggacatcctgtggtgtaccgagatggagagagtgttcggctttccagtgcactacacagacgtgtctaacatgagcaggctggcaaggcagcggctgctgggcagatcttggagcgtgcccgtgatcaggcacctgttcgcccctctgaaggagtattttgcctgcgtgagcagcggcaactccaatgccaacagccggggcccctctttcagctccggattggtgcctctgagcctgaggggctcccacatggcagcaatccccgccctggaccccgaggccgagcctagcatggacgtgatcctggtgggctctagcgagctgtcctctagcgtgtctccaggaaccggaagggatctgatcgcatacgaggtgaaggccaatcagcggaacatcgaggacatctgtatctgctgtggcagcctgcaggtgcacacacagcacccactgttcgagggaggaatctgcgcaccctgtaaggataagttcctggacgccctgtttctgtacgacgatgacggctaccagtcctattgctctatctgctgttccggcgagaccctgctgatctgcggcaatccagattgtacaaggtgctattgttttgagtgcgtggactctctggtgggaccaggcaccagcggaaaggtgcacgccatgtccaactgggtgtgctacctgtgcctgccatcctctcgcagcggactgctgcagcggagaaggaagtggagatcccagctgaaggccttctatgatagggagtctgagaaccccctggagatgtttgagaccgtgccagtgtggcgccggcagcccgtgagggtgctgagcctgttcgaggatatcaagaaggagctgacatccctgggctttctggagtccggctctgaccccggacagctgaagcacgtggtggatgtgaccgacacagtgcggaaggatgtggaggagtggggccctttcgacctggtgtacggagcaacccctccactgggacacacatgcgacagacccccttcttggtacctgttccagtttcaccgcctgctgcagtatgcaaggccaaagccaggcagccctagaccattcttttggatgttcgtggataatctggtgctgaacaaggaggatctggacgtggccagcaggtttctggagatggagccagtgaccatcccagacgtgcacggcggctccctgcagaatgccgtgcgcgtgtggtctaacatccctgccatcagaagcaggcactgggcactggtgagcgaggaggagctgtccctgctggcccagaataagcagagcagcaagctggccgccaagtggcctacaaagctggtgaagaactgcttcctgccactgcgggagtacttcaagtatttttccaccgagctgacatctagcctgggaggaccctcctctggcgccccaccacctagcggcggctcccctgccggctctccaaccagcacagaggagggcaccagcgagtccgccacaccagagtctggacctggcaccagcacagagccatccgagggctctgccccaggctctcctgcaggcagccctacctccaccgaagagggcaccagcacagagccttctgagggcagcgccccaggcacctctacagagccaagcgagctcgagtcccggccaggggaacggcccttccagtgtcggatctgcatgagaaacttttcaaagaagttcaatctgcttcagcacacccggacccacactggagagaaaccctttcagtgcaggatatgtatgcggaatttttcccgaaaagattacttgattagccacctccgaacacataccgggagtcagaagcctttccaatgccggatttgcatgaggaacttctccaggagccacaaccttaaactgcacacaagaacacatacaggcgagaagccattccagtgtaggatctgcatgcgcaattttagccaatccacaacattgaaaagacatcttcggacgcatacaggtagtcagaagccttttcagtgcaggatctgcatgaggaattttagtcgacaagataatcttggccgacatcttcgaacgcatactggagagaagccctttcagtgtaggatttgtatgcggaacttcagcgtagtaaacaacttgaacagacacttgaaaactcatttgcgcgggtctagccccaagaagaagagaaaggtgggagtcgacggatccagcggctccgagaccccaggcacatctgagagcgccacccctgagtcccggaccctggtgacattcaaggacgtgttcgtggacttcacccgggaggagtggaagctgctggacacagcccagcagatcgtgtacaggaacgtgatgctggagaactataagaatctggtgtctctgggctaccagctgacaaagccagatgtgatcctgcggctggagaagggagaggagccctggctggtgtagtctagaaatcaacctctggattacaaaatttgtgaaagattgactggtattcttaactatgttgctccttttacgctatgtggatacgctgctttaatgcctttgtatcatgctattgcttcccgtatggctttcattttctcctccttgtataaatcctggttgctgtctctttatgaggagttgtggcccgttgtcaggcaacgtggcgtggtgtgcactgtgtttgctgacgcaacccccactggttggggcattgccaccacctgtcagctcctttccgggactttcgctttccccctccctattgccacggcggaactcatcgccgcctgccttgcccgctgctggacaggggctcggctgttgggcactgacaattccgtggtgttgtcggggaaatcatcgtcctttccttggctgctcgcctgtgttgccacctggattctgcgcgggacgtccttctgctacgtcccttcggccctcaatccagcggaccttccttcccgcggcctgctgccggctctgcggcctcttccgcgtcttcgccttcgccctcagacgagtcggatctccctttgggccgcctccccgcctgttaattaaaaaaaaaaaaaaaaaaaaaaaaaaaaaaaaaaaaaaaaaaaaaaaaaaaactagtggcgcctgatgcggtattttctccttacgcatctgtgcggtatttcacaccgcataatccagcacagtggcggcccgtttaaacccgctgatcagcctcgactgtgccttctagttgccagccatctgttgtttgcccctcccccgtgccttccttgaccctggaaggtgccactcccactgtcctttcctaataaaatgaggaaattgcatcgcattgtctgagtaggtgtcattctattctggggggtggggtggggcaggacagcaagggggaggattgggaagacaatagcaggcatgctggggatgcggtgggctctatggcttctgaggcggaaagaaccagctgcattaatgaatcggccaacgcgcggggagaggcggtttgcgtattgggcgctcttccgcttcctcgctcactgactcgctgcgctcggtcgttcggctgcggcgagcggtatcagctcactcaaaggcggtaatacggttatccacagaatcaggggataacgcaggaaagaacatgtgagcaaaaggccagcaaaaggccaggaaccgtaaaaaggccgcgttgctggcgtttttccataggctccgcccccctgacgagcatcacaaaaatcgacgctcaagtcagaggtggcgaaacccgacaggactataaagataccaggcgtttccccctggaagctccctcgtgcgctctcctgttccgaccctgccgcttaccggatacctgtccgcctttctcccttcgggaagcgtggcgctttctcatagctcacgctgtaggtatctcagttcggtgtaggtcgttcgctccaagctgggctgtgtgcacgaaccccccgttcagcccgaccgctgcgccttatccggtaactatcgtcttgagtccaacccggtaagacacgacttatcgccactggcagcagccactggtaacaggattagcagagcgaggtatgtaggcggtgctacagagttcttgaagtggtggcctaactacggctacactagaagaacagtatttggtatctgcgctctgctgaagccagttaccttcggaaaaagagttggtagctcttgatccggcaaacaaaccaccgctggtagcggtttttttgtttgcaagcagcagattacgcgcagaaaaaaaggatctcaagaagatcctttgatcttttctacggggtctgacgctcagtggaacgaaaactcacgttaagggattttggtcatgagattatcaaaaaggatcttcacctagatccttttaaattaaaaatgaagttttaaatcaatctaaagtatatatgagtaaacttggtctgacagttaccaatgcttaatcagtgaggcacctatctcagcgatctgtctatttcgttcatccatagttgcctgactccccgtcgtgtagataactacgatacgggagggcttaccatctggccccagtgctgcaatgataccgcgagacccacgctcaccggctccagatttatcagcaataaaccagccagccggaagggccgagcgcagaagtggtcctgcaactttatccgcctccatccagtctattaattgttgccgggaagctagagtaagtagttcgccagttaatagtttgcgcaacgttgttgccattgctacaggcatcgtggtgtcacgctcgtcgtttggtatggcttcattcagctccggttcccaacgatcaaggcgagttacatgatcccccatgttgtgcaaaaaagcggttagctccttcggtcctccgatcgttgtcagaagtaagttggccgcagtgttatcactcatggttatggcagcactgcataattctcttactgtcatgccatccgtaagatgcttttctgtgactggtgagtactcaaccaagtcattctgagaatagtgtatgcggcgaccgagttgctcttgcccggcgtcaatacgggataataccgcgccacatagcagaactttaaaagtgctcatcattggaaaacgttcttcggggcgaaaactctcaaggatcttaccgctgttgagatccagttcgatgtaacccactcgtgcacccaactgatcttcagcatcttttactttcaccagcgtttctgggtgagcaaaaacaggaaggcaaaatgccgcaaaaaagggaataagggcgacacggaaatgttgaatactcatactcttcctttttcaatattattgaagcatttatcagggttattgtctcatgagcggatacatatttgaatgtatttagaaaaataaacaaataggggttccgcgcacatttccccgaaaagtgccacctga

SEQ ID NO: 1238 - DNA, 7162 bp, synthetic construct
  source 1..7162: mol_type = other DNA
cgtcgatcgacggatcgggagatctcccgatcccctatggtgcactctcagtacaatctgctctgatgccgcatagttaagccagtatctgctccctgcttgtgtgttggaggtcgctgagtagtgcgcgagcaaaatttaagctacaacaaggcaaggcttgaccgacaattgcatgaagaatctgcttagggttaggcgttttgcgctgcttcgcgatgtacgggccagatatacgcgttgacattgattattgactagttattaatagtaatcaattacggggtcattagttcatagcccatatatggagttccgcgttacataacttacggtaaatggcccgcctggctgaccgcccaacgacccccgcccattgacgtcaataatgacgtatgttcccatagtaacgccaatagggactttccattgacgtcaatgggtggagtatttacggtaaactgcccacttggcagtacatcaagtgtatcatatgccaagtacgccccctattgacgtcaatgacggtaaatggcccgcctggcattatgcccagtacatgaccttatgggactttcctacttggcagtacatctacgtattagtcatcgctattaccatggtgatgcggttttggcagtacatcaatgggcgtggatagcggtttgactcacggggatttccaagtctccaccccattgacgtcaatgggagtttgttttggcaccaaaatcaacgggactttccaaaatgtcgtaacaactccgccccattgacgcaaatgggcggtaggcgtgtacggtgggaggtctatataagcagagctctctggctaactagagaacccactgcttactggcttatcgaaattaatacgactcactataaggagacccaagctaccggtgccaccatgtacccatacgatgttccagattacgcttcgccgaagaaaaagcgcaaggtcaatcacgatcaggagttcgacccccctaaggtgtacccaccagtgcctgcagagaagaggaagccaatccgggtgctgagcctgtttgatggcatcgccaccggcctgctggtgctgaaggatctgggcatccaggtggaccggtacatcgcctccgaggtgtgcgaggattctatcaccgtgggcatggtgcgccaccagggcaagatcatgtatgtgggcgacgtgcggtccgtgacacagaagcacatccaggagtggggcccattcgatctggtgatcggcggcagcccctgtaatgacctgtccatcgtgaaccctgcaaggaagggactgtacgagggaaccggccggctgttctttgagttttatagactgctgcacgacgccaggcctaaggagggcgacgatagaccattcttttggctgttcgagaatgtggtggctatgggcgtgagcgataagagggacatctccaggtttctggagtctaaccccgtgatgatcgatgcaaaggaggtgtccgccgcacacagagccaggtatttctggggcaatctgccaggaatgaacaggccactggcaagcaccgtgaatgacaagctggagctgcaggagtgcctggagcacggaaggatcgccaagttttccaaggtgcgcacaatcaccacacggagcaattccatcaagcagggcaaggatcagcacttccccgtgttcatgaacgagaaggaggacatcctgtggtgtaccgagatggagagagtgttcggctttccagtgcactacacagacgtgtctaacatgagcaggctggcaaggcagcggctgctgggcagatcttggagcgtgcccgtgatcaggcacctgttcgcccctctgaaggagtattttgcctgcgtgagcagcggcaactccaatgccaacagccggggcccctctttcagctccggattggtgcctctgagcctgaggggctcccacatggcagcaatccccgccctggaccccgaggccgagcctagcatggacgtgatcctggtgggctctagcgagctgtcctctagcgtgtctccaggaaccggaagggatctgatcgcatacgaggtgaaggccaatcagcggaacatcgaggacatctgtatctgctgtggcagcctgcaggtgcacacacagcacccactgttcgagggaggaatctgcgcaccctgtaaggataagttcctggacgccctgtttctgtacgacgatgacggctaccagtcctattgctctatctgctgttccggcgagaccctgctgatctgcggcaatccagattgtacaaggtgctattgttttgagtgcgtggactctctggtgggaccaggcaccagcggaaaggtgcacgccatgtccaactgggtgtgctacctgtgcctgccatcctctcgcagcggactgctgcagcggagaaggaagtggagatcccagctgaaggccttctatgatagggagtctgagaaccccctggagatgtttgagaccgtgccagtgtggcgccggcagcccgtgagggtgctgagcctgttcgaggatatcaagaaggagctgacatccctgggctttctggagtccggctctgaccccggacagctgaagcacgtggtggatgtgaccgacacagtgcggaaggatgtggaggagtggggccctttcgacctggtgtacggagcaacccctccactgggacacacatgcgacagacccccttcttggtacctgttccagtttcaccgcctgctgcagtatgcaaggccaaagccaggcagccctagaccattcttttggatgttcgtggataatctggtgctgaacaaggaggatctggacgtggccagcaggtttctggagatggagccagtgaccatcccagacgtgcacggcggctccctgcagaatgccgtgcgcgtgtggtctaacatccctgccatcagaagcaggcactgggcactggtgagcgaggaggagctgtccctgctggcccagaataagcagagcagcaagctggccgccaagtggcctacaaagctggtgaagaactgcttcctgccactgcgggagtacttcaagtatttttccaccgagctgacatctagcctgggaggaccctcctctggcgccccaccacctagcggcggctcccctgccggctctccaaccagcacagaggagggcaccagcgagtccgccacaccagagtctggacctggcaccagcacagagccatccgagggctctgccccaggctctcctgcaggcagccctacctccaccgaagagggcaccagcacagagccttctgagggcagcgccccaggcacctctacagagccaagcgagctcgagtcccggccaggggaacggcccttccagtgtcggatctgcatgagaaacttttcaaaaaagtttaaccttctccaacacacacgaacccacactggagagaaaccctttcagtgcaggatatgtatgcggaatttttccagaaaagattatttgatcagtcatctgcgaacacataccgggagtcagaagcctttccaatgccggatttgcatgaggaacttctccaggagtcataacctccggttgcacacacgcacacatacaggcgagaagccattccagtgtaggatctgcatgcgcaattttagccagagtacgaccctgaagagacatctgcggacgcatacaggtagtcagaagccttttcagtgcaggatctgcatgaggaattttagtcggcaagataatttggggagacacttgagaacgcatactggagagaagccctttcagtgtaggatttgtatgcggaacttcagcgttgtgaataatttgaatcggcatctcaaaactcatttgcgcgggtctagccccaagaagaagagaaaggtgggagtcgacggatccagcggctccgagaccccaggcacatctgagagcgccacccctgagtcccggaccctggtgacattcaaggacgtgttcgtggacttcacccgggaggagtggaagctgctggacacagcccagcagatcgtgtacaggaacgtgatgctggagaactataagaatctggtgtctctgggctaccagctgacaaagccagatgtgatcctgcggctggagaagggagaggagccctggctggtgtagtctagaaatcaacctctggattacaaaatttgtgaaagattgactggtattcttaactatgttgctccttttacgctatgtggatacgctgctttaatgcctttgtatcatgctattgcttcccgtatggctttcattttctcctccttgtataaatcctggttgctgtctctttatgaggagttgtggcccgttgtcaggcaacgtggcgtggtgtgcactgtgtttgctgacgcaacccccactggttggggcattgccaccacctgtcagctcctttccgggactttcgctttccccctccctattgccacggcggaactcatcgccgcctgccttgcccgctgctggacaggggctcggctgttgggcactgacaattccgtggtgttgtcggggaaatcatcgtcctttccttggctgctcgcctgtgttgccacctggattctgcgcgggacgtccttctgctacgtcccttcggccctcaatccagcggaccttccttcccgcggcctgctgccggctctgcggcctcttccgcgtcttcgccttcgccctcagacgagtcggatctccctttgggccgcctccccgcctgttaattaaaaaaaaaaaaaaaaaaaaaaaaaaaaaaaaaaaaaaaaaaaaaaaaaaaactagtggcgcctgatgcggtattttctccttacgcatctgtgcggtatttcacaccgcataatccagcacagtggcggcccgtttaaacccgctgatcagcctcgactgtgccttctagttgccagccatctgttgtttgcccctcccccgtgccttccttgaccctggaaggtgccactcccactgtcctttcctaataaaatgaggaaattgcatcgcattgtctgagtaggtgtcattctattctggggggtggggtggggcaggacagcaagggggaggattgggaagacaatagcaggcatgctggggatgcggtgggctctatggcttctgaggcggaaagaaccagctgcattaatgaatcggccaacgcgcggggagaggcggtttgcgtattgggcgctcttccgcttcctcgctcactgactcgctgcgctcggtcgttcggctgcggcgagcggtatcagctcactcaaaggcggtaatacggttatccacagaatcaggggataacgcaggaaagaacatgtgagcaaaaggccagcaaaaggccaggaaccgtaaaaaggccgcgttgctggcgtttttccataggctccgcccccctgacgagcatcacaaaaatcgacgctcaagtcagaggtggcgaaacccgacaggactataaagataccaggcgtttccccctggaagctccctcgtgcgctctcctgttccgaccctgccgcttaccggatacctgtccgcctttctcccttcgggaagcgtggcgctttctcatagctcacgctgtaggtatctcagttcggtgtaggtcgttcgctccaagctgggctgtgtgcacgaaccccccgttcagcccgaccgctgcgccttatccggtaactatcgtcttgagtccaacccggtaagacacgacttatcgccactggcagcagccactggtaacaggattagcagagcgaggtatgtaggcggtgctacagagttcttgaagtggtggcctaactacggctacactagaagaacagtatttggtatctgcgctctgctgaagccagttaccttcggaaaaagagttggtagctcttgatccggcaaacaaaccaccgctggtagcggtttttttgtttgcaagcagcagattacgcgcagaaaaaaaggatctcaagaagatcctttgatcttttctacggggtctgacgctcagtggaacgaaaactcacgttaagggattttggtcatgagattatcaaaaaggatcttcacctagatccttttaaattaaaaatgaagttttaaatcaatctaaagtatatatgagtaaacttggtctgacagttaccaatgcttaatcagtgaggcacctatctcagcgatctgtctatttcgttcatccatagttgcctgactccccgtcgtgtagataactacgatacgggagggcttaccatctggccccagtgctgcaatgataccgcgagacccacgctcaccggctccagatttatcagcaataaaccagccagccggaagggccgagcgcagaagtggtcctgcaactttatccgcctccatccagtctattaattgttgccgggaagctagagtaagtagttcgccagttaatagtttgcgcaacgttgttgccattgctacaggcatcgtggtgtcacgctcgtcgtttggtatggcttcattcagctccggttcccaacgatcaaggcgagttacatgatcccccatgttgtgcaaaaaagcggttagctccttcggtcctccgatcgttgtcagaagtaagttggccgcagtgttatcactcatggttatggcagcactgcataattctcttactgtcatgccatccgtaagatgcttttctgtgactggtgagtactcaaccaagtcattctgagaatagtgtatgcggcgaccgagttgctcttgcccggcgtcaatacgggataataccgcgccacatagcagaactttaaaagtgctcatcattggaaaacgttcttcggggcgaaaactctcaaggatcttaccgctgttgagatccagttcgatgtaacccactcgtgcacccaactgatcttcagcatcttttactttcaccagcgtttctgggtgagcaaaaacaggaaggcaaaatgccgcaaaaaagggaataagggcgacacggaaatgttgaatactcatactcttcctttttcaatattattgaagcatttatcagggttattgtctcatgagcggatacatatttgaatgtatttagaaaaataaacaaataggggttccgcgcacatttccccgaaaagtgccacctga

SEQ ID NO: 1239 - DNA, 7162 bp, synthetic construct
  source 1..7162: mol_type = other DNA
cgtcgatcgacggatcgggagatctcccgatcccctatggtgcactctcagtacaatctgctctgatgccgcatagttaagccagtatctgctccctgcttgtgtgttggaggtcgctgagtagtgcgcgagcaaaatttaagctacaacaaggcaaggcttgaccgacaattgcatgaagaatctgcttagggttaggcgttttgcgctgcttcgcgatgtacgggccagatatacgcgttgacattgattattgactagttattaatagtaatcaattacggggtcattagttcatagcccatatatggagttccgcgttacataacttacggtaaatggcccgcctggctgaccgcccaacgacccccgcccattgacgtcaataatgacgtatgttcccatagtaacgccaatagggactttccattgacgtcaatgggtggagtatttacggtaaactgcccacttggcagtacatcaagtgtatcatatgccaagtacgccccctattgacgtcaatgacggtaaatggcccgcctggcattatgcccagtacatgaccttatgggactttcctacttggcagtacatctacgtattagtcatcgctattaccatggtgatgcggttttggcagtacatcaatgggcgtggatagcggtttgactcacggggatttccaagtctccaccccattgacgtcaatgggagtttgttttggcaccaaaatcaacgggactttccaaaatgtcgtaacaactccgccccattgacgcaaatgggcggtaggcgtgtacggtgggaggtctatataagcagagctctctggctaactagagaacccactgcttactggcttatcgaaattaatacgactcactataaggagacccaagctaccggtgccaccatgtacccatacgatgttccagattacgcttcgccgaagaaaaagcgcaaggtcaatcacgatcaggagttcgacccccctaaggtgtacccaccagtgcctgcagagaagaggaagccaatccgggtgctgagcctgtttgatggcatcgccaccggcctgctggtgctgaaggatctgggcatccaggtggaccggtacatcgcctccgaggtgtgcgaggattctatcaccgtgggcatggtgcgccaccagggcaagatcatgtatgtgggcgacgtgcggtccgtgacacagaagcacatccaggagtggggcccattcgatctggtgatcggcggcagcccctgtaatgacctgtccatcgtgaaccctgcaaggaagggactgtacgagggaaccggccggctgttctttgagttttatagactgctgcacgacgccaggcctaaggagggcgacgatagaccattcttttggctgttcgagaatgtggtggctatgggcgtgagcgataagagggacatctccaggtttctggagtctaaccccgtgatgatcgatgcaaaggaggtgtccgccgcacacagagccaggtatttctggggcaatctgccaggaatgaacaggccactggcaagcaccgtgaatgacaagctggagctgcaggagtgcctggagcacggaaggatcgccaagttttccaaggtgcgcacaatcaccacacggagcaattccatcaagcagggcaaggatcagcacttccccgtgttcatgaacgagaaggaggacatcctgtggtgtaccgagatggagagagtgttcggctttccagtgcactacacagacgtgtctaacatgagcaggctggcaaggcagcggctgctgggcagatcttggagcgtgcccgtgatcaggcacctgttcgcccctctgaaggagtattttgcctgcgtgagcagcggcaactccaatgccaacagccggggcccctctttcagctccggattggtgcctctgagcctgaggggctcccacatggcagcaatccccgccctggaccccgaggccgagcctagcatggacgtgatcctggtgggctctagcgagctgtcctctagcgtgtctccaggaaccggaagggatctgatcgcatacgaggtgaaggccaatcagcggaacatcgaggacatctgtatctgctgtggcagcctgcaggtgcacacacagcacccactgttcgagggaggaatctgcgcaccctgtaaggataagttcctggacgccctgtttctgtacgacgatgacggctaccagtcctattgctctatctgctgttccggcgagaccctgctgatctgcggcaatccagattgtacaaggtgctattgttttgagtgcgtggactctctggtgggaccaggcaccagcggaaaggtgcacgccatgtccaactgggtgtgctacctgtgcctgccatcctctcgcagcggactgctgcagcggagaaggaagtggagatcccagctgaaggccttctatgatagggagtctgagaaccccctggagatgtttgagaccgtgccagtgtggcgccggcagcccgtgagggtgctgagcctgttcgaggatatcaagaaggagctgacatccctgggctttctggagtccggctctgaccccggacagctgaagcacgtggtggatgtgaccgacacagtgcggaaggatgtggaggagtggggccctttcgacctggtgtacggagcaacccctccactgggacacacatgcgacagacccccttcttggtacctgttccagtttcaccgcctgctgcagtatgcaaggccaaagccaggcagccctagaccattcttttggatgttcgtggataatctggtgctgaacaaggaggatctggacgtggccagcaggtttctggagatggagccagtgaccatcccagacgtgcacggcggctccctgcagaatgccgtgcgcgtgtggtctaacatccctgccatcagaagcaggcactgggcactggtgagcgaggaggagctgtccctgctggcccagaataagcagagcagcaagctggccgccaagtggcctacaaagctggtgaagaactgcttcctgccactgcgggagtacttcaagtatttttccaccgagctgacatctagcctgggaggaccctcctctggcgccccaccacctagcggcggctcccctgccggctctccaaccagcacagaggagggcaccagcgagtccgccacaccagagtctggacctggcaccagcacagagccatccgagggctctgccccaggctctcctgcaggcagccctacctccaccgaagagggcaccagcacagagccttctgagggcagcgccccaggcacctctacagagccaagcgagctcgagtcccggccaggggaacggcccttccagtgtcggatctgcatgagaaacttttcacgacgccacattttggacagacatactcggacccacactggagagaaaccctttcagtgcaggatatgtatgcggaatttttcccgccaggacaacttggggcggcatctgcgcacacataccgggagtcagaagcctttccaatgccggatttgcatgaggaacttctcccaatctaccactcttaaacgacacttgcgcacacatacaggcgagaagccattccagtgtaggatctgcatgcgcaattttagccgccgggacggcctggcagggcaccttaagacgcatacaggtagtcagaagccttttcagtgcaggatctgcatgaggaattttagtgttcatcataacctcgttaggcatctgagaacgcatactggagagaagccctttcagtgtaggatttgtatgcggaacttcagcatcagtcacaatttggcgcggcaccttaagactcatttgcgcgggtctagccccaagaagaagagaaaggtgggagtcgacggatccagcggctccgagaccccaggcacatctgagagcgccacccctgagtcccggaccctggtgacattcaaggacgtgttcgtggacttcacccgggaggagtggaagctgctggacacagcccagcagatcgtgtacaggaacgtgatgctggagaactataagaatctggtgtctctgggctaccagctgacaaagccagatgtgatcctgcggctggagaagggagaggagccctggctggtgtagtctagaaatcaacctctggattacaaaatttgtgaaagattgactggtattcttaactatgttgctccttttacgctatgtggatacgctgctttaatgcctttgtatcatgctattgcttcccgtatggctttcattttctcctccttgtataaatcctggttgctgtctctttatgaggagttgtggcccgttgtcaggcaacgtggcgtggtgtgcactgtgtttgctgacgcaacccccactggttggggcattgccaccacctgtcagctcctttccgggactttcgctttccccctccctattgccacggcggaactcatcgccgcctgccttgcccgctgctggacaggggctcggctgttgggcactgacaattccgtggtgttgtcggggaaatcatcgtcctttccttggctgctcgcctgtgttgccacctggattctgcgcgggacgtccttctgctacgtcccttcggccctcaatccagcggaccttccttcccgcggcctgctgccggctctgcggcctcttccgcgtcttcgccttcgccctcagacgagtcggatctccctttgggccgcctccccgcctgttaattaaaaaaaaaaaaaaaaaaaaaaaaaaaaaaaaaaaaaaaaaaaaaaaaaaaactagtggcgcctgatgcggtattttctccttacgcatctgtgcggtatttcacaccgcataatccagcacagtggcggcccgtttaaacccgctgatcagcctcgactgtgccttctagttgccagccatctgttgtttgcccctcccccgtgccttccttgaccctggaaggtgccactcccactgtcctttcctaataaaatgaggaaattgcatcgcattgtctgagtaggtgtcattctattctggggggtggggtggggcaggacagcaagggggaggattgggaagacaatagcaggcatgctggggatgcggtgggctctatggcttctgaggcggaaagaaccagctgcattaatgaatcggccaacgcgcggggagaggcggtttgcgtattgggcgctcttccgcttcctcgctcactgactcgctgcgctcggtcgttcggctgcggcgagcggtatcagctcactcaaaggcggtaatacggttatccacagaatcaggggataacgcaggaaagaacatgtgagcaaaaggccagcaaaaggccaggaaccgtaaaaaggccgcgttgctggcgtttttccataggctccgcccccctgacgagcatcacaaaaatcgacgctcaagtcagaggtggcgaaacccgacaggactataaagataccaggcgtttccccctggaagctccctcgtgcgctctcctgttccgaccctgccgcttaccggatacctgtccgcctttctcccttcgggaagcgtggcgctttctcatagctcacgctgtaggtatctcagttcggtgtaggtcgttcgctccaagctgggctgtgtgcacgaaccccccgttcagcccgaccgctgcgccttatccggtaactatcgtcttgagtccaacccggtaagacacgacttatcgccactggcagcagccactggtaacaggattagcagagcgaggtatgtaggcggtgctacagagttcttgaagtggtggcctaactacggctacactagaagaacagtatttggtatctgcgctctgctgaagccagttaccttcggaaaaagagttggtagctcttgatccggcaaacaaaccaccgctggtagcggtttttttgtttgcaagcagcagattacgcgcagaaaaaaaggatctcaagaagatcctttgatcttttctacggggtctgacgctcagtggaacgaaaactcacgttaagggattttggtcatgagattatcaaaaaggatcttcacctagatccttttaaattaaaaatgaagttttaaatcaatctaaagtatatatgagtaaacttggtctgacagttaccaatgcttaatcagtgaggcacctatctcagcgatctgtctatttcgttcatccatagttgcctgactccccgtcgtgtagataactacgatacgggagggcttaccatctggccccagtgctgcaatgataccgcgagacccacgctcaccggctccagatttatcagcaataaaccagccagccggaagggccgagcgcagaagtggtcctgcaactttatccgcctccatccagtctattaattgttgccgggaagctagagtaagtagttcgccagttaatagtttgcgcaacgttgttgccattgctacaggcatcgtggtgtcacgctcgtcgtttggtatggcttcattcagctccggttcccaacgatcaaggcgagttacatgatcccccatgttgtgcaaaaaagcggttagctccttcggtcctccgatcgttgtcagaagtaagttggccgcagtgttatcactcatggttatggcagcactgcataattctcttactgtcatgccatccgtaagatgcttttctgtgactggtgagtactcaaccaagtcattctgagaatagtgtatgcggcgaccgagttgctcttgcccggcgtcaatacgggataataccgcgccacatagcagaactttaaaagtgctcatcattggaaaacgttcttcggggcgaaaactctcaaggatcttaccgctgttgagatccagttcgatgtaacccactcgtgcacccaactgatcttcagcatcttttactttcaccagcgtttctgggtgagcaaaaacaggaaggcaaaatgccgcaaaaaagggaataagggcgacacggaaatgttgaatactcatactcttcctttttcaatattattgaagcatttatcagggttattgtctcatgagcggatacatatttgaatgtatttagaaaaataaacaaataggggttccgcgcacatttccccgaaaagtgccacctga

SEQ ID NO: 1240 - DNA, 7162 bp, synthetic construct
  source 1..7162: mol_type = other DNA
cgtcgatcgacggatcgggagatctcccgatcccctatggtgcactctcagtacaatctgctctgatgccgcatagttaagccagtatctgctccctgcttgtgtgttggaggtcgctgagtagtgcgcgagcaaaatttaagctacaacaaggcaaggcttgaccgacaattgcatgaagaatctgcttagggttaggcgttttgcgctgcttcgcgatgtacgggccagatatacgcgttgacattgattattgactagttattaatagtaatcaattacggggtcattagttcatagcccatatatggagttccgcgttacataacttacggtaaatggcccgcctggctgaccgcccaacgacccccgcccattgacgtcaataatgacgtatgttcccatagtaacgccaatagggactttccattgacgtcaatgggtggagtatttacggtaaactgcccacttggcagtacatcaagtgtatcatatgccaagtacgccccctattgacgtcaatgacggtaaatggcccgcctggcattatgcccagtacatgaccttatgggactttcctacttggcagtacatctacgtattagtcatcgctattaccatggtgatgcggttttggcagtacatcaatgggcgtggatagcggtttgactcacggggatttccaagtctccaccccattgacgtcaatgggagtttgttttggcaccaaaatcaacgggactttccaaaatgtcgtaacaactccgccccattgacgcaaatgggcggtaggcgtgtacggtgggaggtctatataagcagagctctctggctaactagagaacccactgcttactggcttatcgaaattaatacgactcactataaggagacccaagctaccggtgccaccatgtacccatacgatgttccagattacgcttcgccgaagaaaaagcgcaaggtcaatcacgatcaggagttcgacccccctaaggtgtacccaccagtgcctgcagagaagaggaagccaatccgggtgctgagcctgtttgatggcatcgccaccggcctgctggtgctgaaggatctgggcatccaggtggaccggtacatcgcctccgaggtgtgcgaggattctatcaccgtgggcatggtgcgccaccagggcaagatcatgtatgtgggcgacgtgcggtccgtgacacagaagcacatccaggagtggggcccattcgatctggtgatcggcggcagcccctgtaatgacctgtccatcgtgaaccctgcaaggaagggactgtacgagggaaccggccggctgttctttgagttttatagactgctgcacgacgccaggcctaaggagggcgacgatagaccattcttttggctgttcgagaatgtggtggctatgggcgtgagcgataagagggacatctccaggtttctggagtctaaccccgtgatgatcgatgcaaaggaggtgtccgccgcacacagagccaggtatttctggggcaatctgccaggaatgaacaggccactggcaagcaccgtgaatgacaagctggagctgcaggagtgcctggagcacggaaggatcgccaagttttccaaggtgcgcacaatcaccacacggagcaattccatcaagcagggcaaggatcagcacttccccgtgttcatgaacgagaaggaggacatcctgtggtgtaccgagatggagagagtgttcggctttccagtgcactacacagacgtgtctaacatgagcaggctggcaaggcagcggctgctgggcagatcttggagcgtgcccgtgatcaggcacctgttcgcccctctgaaggagtattttgcctgcgtgagcagcggcaactccaatgccaacagccggggcccctctttcagctccggattggtgcctctgagcctgaggggctcccacatggcagcaatccccgccctggaccccgaggccgagcctagcatggacgtgatcctggtgggctctagcgagctgtcctctagcgtgtctccaggaaccggaagggatctgatcgcatacgaggtgaaggccaatcagcggaacatcgaggacatctgtatctgctgtggcagcctgcaggtgcacacacagcacccactgttcgagggaggaatctgcgcaccctgtaaggataagttcctggacgccctgtttctgtacgacgatgacggctaccagtcctattgctctatctgctgttccggcgagaccctgctgatctgcggcaatccagattgtacaaggtgctattgttttgagtgcgtggactctctggtgggaccaggcaccagcggaaaggtgcacgccatgtccaactgggtgtgctacctgtgcctgccatcctctcgcagcggactgctgcagcggagaaggaagtggagatcccagctgaaggccttctatgatagggagtctgagaaccccctggagatgtttgagaccgtgccagtgtggcgccggcagcccgtgagggtgctgagcctgttcgaggatatcaagaaggagctgacatccctgggctttctggagtccggctctgaccccggacagctgaagcacgtggtggatgtgaccgacacagtgcggaaggatgtggaggagtggggccctttcgacctggtgtacggagcaacccctccactgggacacacatgcgacagacccccttcttggtacctgttccagtttcaccgcctgctgcagtatgcaaggccaaagccaggcagccctagaccattcttttggatgttcgtggataatctggtgctgaacaaggaggatctggacgtggccagcaggtttctggagatggagccagtgaccatcccagacgtgcacggcggctccctgcagaatgccgtgcgcgtgtggtctaacatccctgccatcagaagcaggcactgggcactggtgagcgaggaggagctgtccctgctggcccagaataagcagagcagcaagctggccgccaagtggcctacaaagctggtgaagaactgcttcctgccactgcgggagtacttcaagtatttttccaccgagctgacatctagcctgggaggaccctcctctggcgccccaccacctagcggcggctcccctgccggctctccaaccagcacagaggagggcaccagcgagtccgccacaccagagtctggacctggcaccagcacagagccatccgagggctctgccccaggctctcctgcaggcagccctacctccaccgaagagggcaccagcacagagccttctgagggcagcgccccaggcacctctacagagccaagcgagctcgagtcccggccaggggaacggcccttccagtgtcggatctgcatgagaaacttttcacgccgggaggtattggaaaaccatttgcgaacccacactggagagaaaccctttcagtgcaggatatgtatgcggaatttttcccggcgggataatctcaatcggcacttgaaaacacataccgggagtcagaagcctttccaatgccggatttgcatgaggaacttctcccaatccactaccctcaagcgacatctgcggacacatacaggcgagaagccattccagtgtaggatctgcatgcgcaattttagccgaagggatgggctggcgggccatcttaagacgcatacaggtagtcagaagccttttcagtgcaggatctgcatgaggaattttagtgtccatcacaacctggtcagacaccttaggacgcatactggagagaagccctttcagtgtaggatttgtatgcggaacttcagcatatcacataaccttgcccgacacttgaagactcatttgcgcgggtctagccccaagaagaagagaaaggtgggagtcgacggatccagcggctccgagaccccaggcacatctgagagcgccacccctgagtcccggaccctggtgacattcaaggacgtgttcgtggacttcacccgggaggagtggaagctgctggacacagcccagcagatcgtgtacaggaacgtgatgctggagaactataagaatctggtgtctctgggctaccagctgacaaagccagatgtgatcctgcggctggagaagggagaggagccctggctggtgtagtctagaaatcaacctctggattacaaaatttgtgaaagattgactggtattcttaactatgttgctccttttacgctatgtggatacgctgctttaatgcctttgtatcatgctattgcttcccgtatggctttcattttctcctccttgtataaatcctggttgctgtctctttatgaggagttgtggcccgttgtcaggcaacgtggcgtggtgtgcactgtgtttgctgacgcaacccccactggttggggcattgccaccacctgtcagctcctttccgggactttcgctttccccctccctattgccacggcggaactcatcgccgcctgccttgcccgctgctggacaggggctcggctgttgggcactgacaattccgtggtgttgtcggggaaatcatcgtcctttccttggctgctcgcctgtgttgccacctggattctgcgcgggacgtccttctgctacgtcccttcggccctcaatccagcggaccttccttcccgcggcctgctgccggctctgcggcctcttccgcgtcttcgccttcgccctcagacgagtcggatctccctttgggccgcctccccgcctgttaattaaaaaaaaaaaaaaaaaaaaaaaaaaaaaaaaaaaaaaaaaaaaaaaaaaaactagtggcgcctgatgcggtattttctccttacgcatctgtgcggtatttcacaccgcataatccagcacagtggcggcccgtttaaacccgctgatcagcctcgactgtgccttctagttgccagccatctgttgtttgcccctcccccgtgccttccttgaccctggaaggtgccactcccactgtcctttcctaataaaatgaggaaattgcatcgcattgtctgagtaggtgtcattctattctggggggtggggtggggcaggacagcaagggggaggattgggaagacaatagcaggcatgctggggatgcggtgggctctatggcttctgaggcggaaagaaccagctgcattaatgaatcggccaacgcgcggggagaggcggtttgcgtattgggcgctcttccgcttcctcgctcactgactcgctgcgctcggtcgttcggctgcggcgagcggtatcagctcactcaaaggcggtaatacggttatccacagaatcaggggataacgcaggaaagaacatgtgagcaaaaggccagcaaaaggccaggaaccgtaaaaaggccgcgttgctggcgtttttccataggctccgcccccctgacgagcatcacaaaaatcgacgctcaagtcagaggtggcgaaacccgacaggactataaagataccaggcgtttccccctggaagctccctcgtgcgctctcctgttccgaccctgccgcttaccggatacctgtccgcctttctcccttcgggaagcgtggcgctttctcatagctcacgctgtaggtatctcagttcggtgtaggtcgttcgctccaagctgggctgtgtgcacgaaccccccgttcagcccgaccgctgcgccttatccggtaactatcgtcttgagtccaacccggtaagacacgacttatcgccactggcagcagccactggtaacaggattagcagagcgaggtatgtaggcggtgctacagagttcttgaagtggtggcctaactacggctacactagaagaacagtatttggtatctgcgctctgctgaagccagttaccttcggaaaaagagttggtagctcttgatccggcaaacaaaccaccgctggtagcggtttttttgtttgcaagcagcagattacgcgcagaaaaaaaggatctcaagaagatcctttgatcttttctacggggtctgacgctcagtggaacgaaaactcacgttaagggattttggtcatgagattatcaaaaaggatcttcacctagatccttttaaattaaaaatgaagttttaaatcaatctaaagtatatatgagtaaacttggtctgacagttaccaatgcttaatcagtgaggcacctatctcagcgatctgtctatttcgttcatccatagttgcctgactccccgtcgtgtagataactacgatacgggagggcttaccatctggccccagtgctgcaatgataccgcgagacccacgctcaccggctccagatttatcagcaataaaccagccagccggaagggccgagcgcagaagtggtcctgcaactttatccgcctccatccagtctattaattgttgccgggaagctagagtaagtagttcgccagttaatagtttgcgcaacgttgttgccattgctacaggcatcgtggtgtcacgctcgtcgtttggtatggcttcattcagctccggttcccaacgatcaaggcgagttacatgatcccccatgttgtgcaaaaaagcggttagctccttcggtcctccgatcgttgtcagaagtaagttggccgcagtgttatcactcatggttatggcagcactgcataattctcttactgtcatgccatccgtaagatgcttttctgtgactggtgagtactcaaccaagtcattctgagaatagtgtatgcggcgaccgagttgctcttgcccggcgtcaatacgggataataccgcgccacatagcagaactttaaaagtgctcatcattggaaaacgttcttcggggcgaaaactctcaaggatcttaccgctgttgagatccagttcgatgtaacccactcgtgcacccaactgatcttcagcatcttttactttcaccagcgtttctgggtgagcaaaaacaggaaggcaaaatgccgcaaaaaagggaataagggcgacacggaaatgttgaatactcatactcttcctttttcaatattattgaagcatttatcagggttattgtctcatgagcggatacatatttgaatgtatttagaaaaataaacaaataggggttccgcgcacatttccccgaaaagtgccacctga

SEQ ID NO: 1241 - DNA, 7162 bp, synthetic construct
  source 1..7162: mol_type = other DNA
cgtcgatcgacggatcgggagatctcccgatcccctatggtgcactctcagtacaatctgctctgatgccgcatagttaagccagtatctgctccctgcttgtgtgttggaggtcgctgagtagtgcgcgagcaaaatttaagctacaacaaggcaaggcttgaccgacaattgcatgaagaatctgcttagggttaggcgttttgcgctgcttcgcgatgtacgggccagatatacgcgttgacattgattattgactagttattaatagtaatcaattacggggtcattagttcatagcccatatatggagttccgcgttacataacttacggtaaatggcccgcctggctgaccgcccaacgacccccgcccattgacgtcaataatgacgtatgttcccatagtaacgccaatagggactttccattgacgtcaatgggtggagtatttacggtaaactgcccacttggcagtacatcaagtgtatcatatgccaagtacgccccctattgacgtcaatgacggtaaatggcccgcctggcattatgcccagtacatgaccttatgggactttcctacttggcagtacatctacgtattagtcatcgctattaccatggtgatgcggttttggcagtacatcaatgggcgtggatagcggtttgactcacggggatttccaagtctccaccccattgacgtcaatgggagtttgttttggcaccaaaatcaacgggactttccaaaatgtcgtaacaactccgccccattgacgcaaatgggcggtaggcgtgtacggtgggaggtctatataagcagagctctctggctaactagagaacccactgcttactggcttatcgaaattaatacgactcactataaggagacccaagctaccggtgccaccatgtacccatacgatgttccagattacgcttcgccgaagaaaaagcgcaaggtcaatcacgatcaggagttcgacccccctaaggtgtacccaccagtgcctgcagagaagaggaagccaatccgggtgctgagcctgtttgatggcatcgccaccggcctgctggtgctgaaggatctgggcatccaggtggaccggtacatcgcctccgaggtgtgcgaggattctatcaccgtgggcatggtgcgccaccagggcaagatcatgtatgtgggcgacgtgcggtccgtgacacagaagcacatccaggagtggggcccattcgatctggtgatcggcggcagcccctgtaatgacctgtccatcgtgaaccctgcaaggaagggactgtacgagggaaccggccggctgttctttgagttttatagactgctgcacgacgccaggcctaaggagggcgacgatagaccattcttttggctgttcgagaatgtggtggctatgggcgtgagcgataagagggacatctccaggtttctggagtctaaccccgtgatgatcgatgcaaaggaggtgtccgccgcacacagagccaggtatttctggggcaatctgccaggaatgaacaggccactggcaagcaccgtgaatgacaagctggagctgcaggagtgcctggagcacggaaggatcgccaagttttccaaggtgcgcacaatcaccacacggagcaattccatcaagcagggcaaggatcagcacttccccgtgttcatgaacgagaaggaggacatcctgtggtgtaccgagatggagagagtgttcggctttccagtgcactacacagacgtgtctaacatgagcaggctggcaaggcagcggctgctgggcagatcttggagcgtgcccgtgatcaggcacctgttcgcccctctgaaggagtattttgcctgcgtgagcagcggcaactccaatgccaacagccggggcccctctttcagctccggattggtgcctctgagcctgaggggctcccacatggcagcaatccccgccctggaccccgaggccgagcctagcatggacgtgatcctggtgggctctagcgagctgtcctctagcgtgtctccaggaaccggaagggatctgatcgcatacgaggtgaaggccaatcagcggaacatcgaggacatctgtatctgctgtggcagcctgcaggtgcacacacagcacccactgttcgagggaggaatctgcgcaccctgtaaggataagttcctggacgccctgtttctgtacgacgatgacggctaccagtcctattgctctatctgctgttccggcgagaccctgctgatctgcggcaatccagattgtacaaggtgctattgttttgagtgcgtggactctctggtgggaccaggcaccagcggaaaggtgcacgccatgtccaactgggtgtgctacctgtgcctgccatcctctcgcagcggactgctgcagcggagaaggaagtggagatcccagctgaaggccttctatgatagggagtctgagaaccccctggagatgtttgagaccgtgccagtgtggcgccggcagcccgtgagggtgctgagcctgttcgaggatatcaagaaggagctgacatccctgggctttctggagtccggctctgaccccggacagctgaagcacgtggtggatgtgaccgacacagtgcggaaggatgtggaggagtggggccctttcgacctggtgtacggagcaacccctccactgggacacacatgcgacagacccccttcttggtacctgttccagtttcaccgcctgctgcagtatgcaaggccaaagccaggcagccctagaccattcttttggatgttcgtggataatctggtgctgaacaaggaggatctggacgtggccagcaggtttctggagatggagccagtgaccatcccagacgtgcacggcggctccctgcagaatgccgtgcgcgtgtggtctaacatccctgccatcagaagcaggcactgggcactggtgagcgaggaggagctgtccctgctggcccagaataagcagagcagcaagctggccgccaagtggcctacaaagctggtgaagaactgcttcctgccactgcgggagtacttcaagtatttttccaccgagctgacatctagcctgggaggaccctcctctggcgccccaccacctagcggcggctcccctgccggctctccaaccagcacagaggagggcaccagcgagtccgccacaccagagtctggacctggcaccagcacagagccatccgagggctctgccccaggctctcctgcaggcagccctacctccaccgaagagggcaccagcacagagccttctgagggcagcgccccaggcacctctacagagccaagcgagctcgagtcccggccaggggaacggcccttccagtgtcggatctgcatgagaaacttttcacgcagggcagtgttggatagacatacccggacccacactggagagaaaccctttcagtgcaggatatgtatgcggaatttttcccgacaagataatctggggaggcatctgcggacacataccgggagtcagaagcctttccaatgccggatttgcatgaggaacttctcccaatcaactaccctgaagcgacatctgcgcacacatacaggcgagaagccattccagtgtaggatctgcatgcgcaattttagccgccgcgatgggctggctggacacctgaagacgcatacaggtagtcagaagccttttcagtgcaggatctgcatgaggaattttagtgttcatcacaacttggtccgacaccttcggacgcatactggagagaagccctttcagtgtaggatttgtatgcggaacttcagcatttcacacaacctcgcgcgccacttgaaaactcatttgcgcgggtctagccccaagaagaagagaaaggtgggagtcgacggatccagcggctccgagaccccaggcacatctgagagcgccacccctgagtcccggaccctggtgacattcaaggacgtgttcgtggacttcacccgggaggagtggaagctgctggacacagcccagcagatcgtgtacaggaacgtgatgctggagaactataagaatctggtgtctctgggctaccagctgacaaagccagatgtgatcctgcggctggagaagggagaggagccctggctggtgtagtctagaaatcaacctctggattacaaaatttgtgaaagattgactggtattcttaactatgttgctccttttacgctatgtggatacgctgctttaatgcctttgtatcatgctattgcttcccgtatggctttcattttctcctccttgtataaatcctggttgctgtctctttatgaggagttgtggcccgttgtcaggcaacgtggcgtggtgtgcactgtgtttgctgacgcaacccccactggttggggcattgccaccacctgtcagctcctttccgggactttcgctttccccctccctattgccacggcggaactcatcgccgcctgccttgcccgctgctggacaggggctcggctgttgggcactgacaattccgtggtgttgtcggggaaatcatcgtcctttccttggctgctcgcctgtgttgccacctggattctgcgcgggacgtccttctgctacgtcccttcggccctcaatccagcggaccttccttcccgcggcctgctgccggctctgcggcctcttccgcgtcttcgccttcgccctcagacgagtcggatctccctttgggccgcctccccgcctgttaattaaaaaaaaaaaaaaaaaaaaaaaaaaaaaaaaaaaaaaaaaaaaaaaaaaaactagtggcgcctgatgcggtattttctccttacgcatctgtgcggtatttcacaccgcataatccagcacagtggcggcccgtttaaacccgctgatcagcctcgactgtgccttctagttgccagccatctgttgtttgcccctcccccgtgccttccttgaccctggaaggtgccactcccactgtcctttcctaataaaatgaggaaattgcatcgcattgtctgagtaggtgtcattctattctggggggtggggtggggcaggacagcaagggggaggattgggaagacaatagcaggcatgctggggatgcggtgggctctatggcttctgaggcggaaagaaccagctgcattaatgaatcggccaacgcgcggggagaggcggtttgcgtattgggcgctcttccgcttcctcgctcactgactcgctgcgctcggtcgttcggctgcggcgagcggtatcagctcactcaaaggcggtaatacggttatccacagaatcaggggataacgcaggaaagaacatgtgagcaaaaggccagcaaaaggccaggaaccgtaaaaaggccgcgttgctggcgtttttccataggctccgcccccctgacgagcatcacaaaaatcgacgctcaagtcagaggtggcgaaacccgacaggactataaagataccaggcgtttccccctggaagctccctcgtgcgctctcctgttccgaccctgccgcttaccggatacctgtccgcctttctcccttcgggaagcgtggcgctttctcatagctcacgctgtaggtatctcagttcggtgtaggtcgttcgctccaagctgggctgtgtgcacgaaccccccgttcagcccgaccgctgcgccttatccggtaactatcgtcttgagtccaacccggtaagacacgacttatcgccactggcagcagccactggtaacaggattagcagagcgaggtatgtaggcggtgctacagagttcttgaagtggtggcctaactacggctacactagaagaacagtatttggtatctgcgctctgctgaagccagttaccttcggaaaaagagttggtagctcttgatccggcaaacaaaccaccgctggtagcggtttttttgtttgcaagcagcagattacgcgcagaaaaaaaggatctcaagaagatcctttgatcttttctacggggtctgacgctcagtggaacgaaaactcacgttaagggattttggtcatgagattatcaaaaaggatcttcacctagatccttttaaattaaaaatgaagttttaaatcaatctaaagtatatatgagtaaacttggtctgacagttaccaatgcttaatcagtgaggcacctatctcagcgatctgtctatttcgttcatccatagttgcctgactccccgtcgtgtagataactacgatacgggagggcttaccatctggccccagtgctgcaatgataccgcgagacccacgctcaccggctccagatttatcagcaataaaccagccagccggaagggccgagcgcagaagtggtcctgcaactttatccgcctccatccagtctattaattgttgccgggaagctagagtaagtagttcgccagttaatagtttgcgcaacgttgttgccattgctacaggcatcgtggtgtcacgctcgtcgtttggtatggcttcattcagctccggttcccaacgatcaaggcgagttacatgatcccccatgttgtgcaaaaaagcggttagctccttcggtcctccgatcgttgtcagaagtaagttggccgcagtgttatcactcatggttatggcagcactgcataattctcttactgtcatgccatccgtaagatgcttttctgtgactggtgagtactcaaccaagtcattctgagaatagtgtatgcggcgaccgagttgctcttgcccggcgtcaatacgggataataccgcgccacatagcagaactttaaaagtgctcatcattggaaaacgttcttcggggcgaaaactctcaaggatcttaccgctgttgagatccagttcgatgtaacccactcgtgcacccaactgatcttcagcatcttttactttcaccagcgtttctgggtgagcaaaaacaggaaggcaaaatgccgcaaaaaagggaataagggcgacacggaaatgttgaatactcatactcttcctttttcaatattattgaagcatttatcagggttattgtctcatgagcggatacatatttgaatgtatttagaaaaataaacaaataggggttccgcgcacatttccccgaaaagtgccacctga

SEQ ID NO: 1242 - DNA, 7162 bp, synthetic construct
  source 1..7162: mol_type = other DNA
cgtcgatcgacggatcgggagatctcccgatcccctatggtgcactctcagtacaatctgctctgatgccgcatagttaagccagtatctgctccctgcttgtgtgttggaggtcgctgagtagtgcgcgagcaaaatttaagctacaacaaggcaaggcttgaccgacaattgcatgaagaatctgcttagggttaggcgttttgcgctgcttcgcgatgtacgggccagatatacgcgttgacattgattattgactagttattaatagtaatcaattacggggtcattagttcatagcccatatatggagttccgcgttacataacttacggtaaatggcccgcctggctgaccgcccaacgacccccgcccattgacgtcaataatgacgtatgttcccatagtaacgccaatagggactttccattgacgtcaatgggtggagtatttacggtaaactgcccacttggcagtacatcaagtgtatcatatgccaagtacgccccctattgacgtcaatgacggtaaatggcccgcctggcattatgcccagtacatgaccttatgggactttcctacttggcagtacatctacgtattagtcatcgctattaccatggtgatgcggttttggcagtacatcaatgggcgtggatagcggtttgactcacggggatttccaagtctccaccccattgacgtcaatgggagtttgttttggcaccaaaatcaacgggactttccaaaatgtcgtaacaactccgccccattgacgcaaatgggcggtaggcgtgtacggtgggaggtctatataagcagagctctctggctaactagagaacccactgcttactggcttatcgaaattaatacgactcactataaggagacccaagctaccggtgccaccatgtacccatacgatgttccagattacgcttcgccgaagaaaaagcgcaaggtcaatcacgatcaggagttcgacccccctaaggtgtacccaccagtgcctgcagagaagaggaagccaatccgggtgctgagcctgtttgatggcatcgccaccggcctgctggtgctgaaggatctgggcatccaggtggaccggtacatcgcctccgaggtgtgcgaggattctatcaccgtgggcatggtgcgccaccagggcaagatcatgtatgtgggcgacgtgcggtccgtgacacagaagcacatccaggagtggggcccattcgatctggtgatcggcggcagcccctgtaatgacctgtccatcgtgaaccctgcaaggaagggactgtacgagggaaccggccggctgttctttgagttttatagactgctgcacgacgccaggcctaaggagggcgacgatagaccattcttttggctgttcgagaatgtggtggctatgggcgtgagcgataagagggacatctccaggtttctggagtctaaccccgtgatgatcgatgcaaaggaggtgtccgccgcacacagagccaggtatttctggggcaatctgccaggaatgaacaggccactggcaagcaccgtgaatgacaagctggagctgcaggagtgcctggagcacggaaggatcgccaagttttccaaggtgcgcacaatcaccacacggagcaattccatcaagcagggcaaggatcagcacttccccgtgttcatgaacgagaaggaggacatcctgtggtgtaccgagatggagagagtgttcggctttccagtgcactacacagacgtgtctaacatgagcaggctggcaaggcagcggctgctgggcagatcttggagcgtgcccgtgatcaggcacctgttcgcccctctgaaggagtattttgcctgcgtgagcagcggcaactccaatgccaacagccggggcccctctttcagctccggattggtgcctctgagcctgaggggctcccacatggcagcaatccccgccctggaccccgaggccgagcctagcatggacgtgatcctggtgggctctagcgagctgtcctctagcgtgtctccaggaaccggaagggatctgatcgcatacgaggtgaaggccaatcagcggaacatcgaggacatctgtatctgctgtggcagcctgcaggtgcacacacagcacccactgttcgagggaggaatctgcgcaccctgtaaggataagttcctggacgccctgtttctgtacgacgatgacggctaccagtcctattgctctatctgctgttccggcgagaccctgctgatctgcggcaatccagattgtacaaggtgctattgttttgagtgcgtggactctctggtgggaccaggcaccagcggaaaggtgcacgccatgtccaactgggtgtgctacctgtgcctgccatcctctcgcagcggactgctgcagcggagaaggaagtggagatcccagctgaaggccttctatgatagggagtctgagaaccccctggagatgtttgagaccgtgccagtgtggcgccggcagcccgtgagggtgctgagcctgttcgaggatatcaagaaggagctgacatccctgggctttctggagtccggctctgaccccggacagctgaagcacgtggtggatgtgaccgacacagtgcggaaggatgtggaggagtggggccctttcgacctggtgtacggagcaacccctccactgggacacacatgcgacagacccccttcttggtacctgttccagtttcaccgcctgctgcagtatgcaaggccaaagccaggcagccctagaccattcttttggatgttcgtggataatctggtgctgaacaaggaggatctggacgtggccagcaggtttctggagatggagccagtgaccatcccagacgtgcacggcggctccctgcagaatgccgtgcgcgtgtggtctaacatccctgccatcagaagcaggcactgggcactggtgagcgaggaggagctgtccctgctggcccagaataagcagagcagcaagctggccgccaagtggcctacaaagctggtgaagaactgcttcctgccactgcgggagtacttcaagtatttttccaccgagctgacatctagcctgggaggaccctcctctggcgccccaccacctagcggcggctcccctgccggctctccaaccagcacagaggagggcaccagcgagtccgccacaccagagtctggacctggcaccagcacagagccatccgagggctctgccccaggctctcctgcaggcagccctacctccaccgaagagggcaccagcacagagccttctgagggcagcgccccaggcacctctacagagccaagcgagctcgagtcccggccaggggaacggcccttccagtgtcggatctgcatgagaaacttttcaagagcagataatctgggtcggcacctccgcacccacactggagagaaaccctttcagtgcaggatatgtatgcggaatttttcccgcaacacgcatctcagttatcaccttaaaacacataccgggagtcagaagcctttccaatgccggatttgcatgaggaacttctccaggggcgacggcttgaggcggcatcttcgcacacatacaggcgagaagccattccagtgtaggatctgcatgcgcaattttagccgcagagacaatttgaacagacatctcaaaacgcatacaggtagtcagaagccttttcagtgcaggatctgcatgaggaattttagtcgagcaagaaacttgacgctgcacacccggacgcatactggagagaagccctttcagtgtaggatttgtatgcggaacttcagcgacccttcatctttgaagcgccatcttcgcactcatttgcgcgggtctagccccaagaagaagagaaaggtgggagtcgacggatccagcggctccgagaccccaggcacatctgagagcgccacccctgagtcccggaccctggtgacattcaaggacgtgttcgtggacttcacccgggaggagtggaagctgctggacacagcccagcagatcgtgtacaggaacgtgatgctggagaactataagaatctggtgtctctgggctaccagctgacaaagccagatgtgatcctgcggctggagaagggagaggagccctggctggtgtagtctagaaatcaacctctggattacaaaatttgtgaaagattgactggtattcttaactatgttgctccttttacgctatgtggatacgctgctttaatgcctttgtatcatgctattgcttcccgtatggctttcattttctcctccttgtataaatcctggttgctgtctctttatgaggagttgtggcccgttgtcaggcaacgtggcgtggtgtgcactgtgtttgctgacgcaacccccactggttggggcattgccaccacctgtcagctcctttccgggactttcgctttccccctccctattgccacggcggaactcatcgccgcctgccttgcccgctgctggacaggggctcggctgttgggcactgacaattccgtggtgttgtcggggaaatcatcgtcctttccttggctgctcgcctgtgttgccacctggattctgcgcgggacgtccttctgctacgtcccttcggccctcaatccagcggaccttccttcccgcggcctgctgccggctctgcggcctcttccgcgtcttcgccttcgccctcagacgagtcggatctccctttgggccgcctccccgcctgttaattaaaaaaaaaaaaaaaaaaaaaaaaaaaaaaaaaaaaaaaaaaaaaaaaaaaactagtggcgcctgatgcggtattttctccttacgcatctgtgcggtatttcacaccgcataatccagcacagtggcggcccgtttaaacccgctgatcagcctcgactgtgccttctagttgccagccatctgttgtttgcccctcccccgtgccttccttgaccctggaaggtgccactcccactgtcctttcctaataaaatgaggaaattgcatcgcattgtctgagtaggtgtcattctattctggggggtggggtggggcaggacagcaagggggaggattgggaagacaatagcaggcatgctggggatgcggtgggctctatggcttctgaggcggaaagaaccagctgcattaatgaatcggccaacgcgcggggagaggcggtttgcgtattgggcgctcttccgcttcctcgctcactgactcgctgcgctcggtcgttcggctgcggcgagcggtatcagctcactcaaaggcggtaatacggttatccacagaatcaggggataacgcaggaaagaacatgtgagcaaaaggccagcaaaaggccaggaaccgtaaaaaggccgcgttgctggcgtttttccataggctccgcccccctgacgagcatcacaaaaatcgacgctcaagtcagaggtggcgaaacccgacaggactataaagataccaggcgtttccccctggaagctccctcgtgcgctctcctgttccgaccctgccgcttaccggatacctgtccgcctttctcccttcgggaagcgtggcgctttctcatagctcacgctgtaggtatctcagttcggtgtaggtcgttcgctccaagctgggctgtgtgcacgaaccccccgttcagcccgaccgctgcgccttatccggtaactatcgtcttgagtccaacccggtaagacacgacttatcgccactggcagcagccactggtaacaggattagcagagcgaggtatgtaggcggtgctacagagttcttgaagtggtggcctaactacggctacactagaagaacagtatttggtatctgcgctctgctgaagccagttaccttcggaaaaagagttggtagctcttgatccggcaaacaaaccaccgctggtagcggtttttttgtttgcaagcagcagattacgcgcagaaaaaaaggatctcaagaagatcctttgatcttttctacggggtctgacgctcagtggaacgaaaactcacgttaagggattttggtcatgagattatcaaaaaggatcttcacctagatccttttaaattaaaaatgaagttttaaatcaatctaaagtatatatgagtaaacttggtctgacagttaccaatgcttaatcagtgaggcacctatctcagcgatctgtctatttcgttcatccatagttgcctgactccccgtcgtgtagataactacgatacgggagggcttaccatctggccccagtgctgcaatgataccgcgagacccacgctcaccggctccagatttatcagcaataaaccagccagccggaagggccgagcgcagaagtggtcctgcaactttatccgcctccatccagtctattaattgttgccgggaagctagagtaagtagttcgccagttaatagtttgcgcaacgttgttgccattgctacaggcatcgtggtgtcacgctcgtcgtttggtatggcttcattcagctccggttcccaacgatcaaggcgagttacatgatcccccatgttgtgcaaaaaagcggttagctccttcggtcctccgatcgttgtcagaagtaagttggccgcagtgttatcactcatggttatggcagcactgcataattctcttactgtcatgccatccgtaagatgcttttctgtgactggtgagtactcaaccaagtcattctgagaatagtgtatgcggcgaccgagttgctcttgcccggcgtcaatacgggataataccgcgccacatagcagaactttaaaagtgctcatcattggaaaacgttcttcggggcgaaaactctcaaggatcttaccgctgttgagatccagttcgatgtaacccactcgtgcacccaactgatcttcagcatcttttactttcaccagcgtttctgggtgagcaaaaacaggaaggcaaaatgccgcaaaaaagggaataagggcgacacggaaatgttgaatactcatactcttcctttttcaatattattgaagcatttatcagggttattgtctcatgagcggatacatatttgaatgtatttagaaaaataaacaaataggggttccgcgcacatttccccgaaaagtgccacctga

SEQ ID NO: 1243 - DNA, 7171 bp, synthetic construct
  source 1..7171: mol_type = other DNA
cgtcgatcgacggatcgggagatctcccgatcccctatggtgcactctcagtacaatctgctctgatgccgcatagttaagccagtatctgctccctgcttgtgtgttggaggtcgctgagtagtgcgcgagcaaaatttaagctacaacaaggcaaggcttgaccgacaattgcatgaagaatctgcttagggttaggcgttttgcgctgcttcgcgatgtacgggccagatatacgcgttgacattgattattgactagttattaatagtaatcaattacggggtcattagttcatagcccatatatggagttccgcgttacataacttacggtaaatggcccgcctggctgaccgcccaacgacccccgcccattgacgtcaataatgacgtatgttcccatagtaacgccaatagggactttccattgacgtcaatgggtggagtatttacggtaaactgcccacttggcagtacatcaagtgtatcatatgccaagtacgccccctattgacgtcaatgacggtaaatggcccgcctggcattatgcccagtacatgaccttatgggactttcctacttggcagtacatctacgtattagtcatcgctattaccatggtgatgcggttttggcagtacatcaatgggcgtggatagcggtttgactcacggggatttccaagtctccaccccattgacgtcaatgggagtttgttttggcaccaaaatcaacgggactttccaaaatgtcgtaacaactccgccccattgacgcaaatgggcggtaggcgtgtacggtgggaggtctatataagcagagctctctggctaactagagaacccactgcttactggcttatcgaaattaatacgactcactataaggagacccaagctaccggtgccaccatgtacccatacgatgttccagattacgcttcgccgaagaaaaagcgcaaggtcaatcacgatcaggagttcgacccccctaaggtgtacccaccagtgcctgcagagaagaggaagccaatccgggtgctgagcctgtttgatggcatcgccaccggcctgctggtgctgaaggatctgggcatccaggtggaccggtacatcgcctccgaggtgtgcgaggattctatcaccgtgggcatggtgcgccaccagggcaagatcatgtatgtgggcgacgtgcggtccgtgacacagaagcacatccaggagtggggcccattcgatctggtgatcggcggcagcccctgtaatgacctgtccatcgtgaaccctgcaaggaagggactgtacgagggaaccggccggctgttctttgagttttatagactgctgcacgacgccaggcctaaggagggcgacgatagaccattcttttggctgttcgagaatgtggtggctatgggcgtgagcgataagagggacatctccaggtttctggagtctaaccccgtgatgatcgatgcaaaggaggtgtccgccgcacacagagccaggtatttctggggcaatctgccaggaatgaacaggccactggcaagcaccgtgaatgacaagctggagctgcaggagtgcctggagcacggaaggatcgccaagttttccaaggtgcgcacaatcaccacacggagcaattccatcaagcagggcaaggatcagcacttccccgtgttcatgaacgagaaggaggacatcctgtggtgtaccgagatggagagagtgttcggctttccagtgcactacacagacgtgtctaacatgagcaggctggcaaggcagcggctgctgggcagatcttggagcgtgcccgtgatcaggcacctgttcgcccctctgaaggagtattttgcctgcgtgagcagcggcaactccaatgccaacagccggggcccctctttcagctccggattggtgcctctgagcctgaggggctcccacatggcagcaatccccgccctggaccccgaggccgagcctagcatggacgtgatcctggtgggctctagcgagctgtcctctagcgtgtctccaggaaccggaagggatctgatcgcatacgaggtgaaggccaatcagcggaacatcgaggacatctgtatctgctgtggcagcctgcaggtgcacacacagcacccactgttcgagggaggaatctgcgcaccctgtaaggataagttcctggacgccctgtttctgtacgacgatgacggctaccagtcctattgctctatctgctgttccggcgagaccctgctgatctgcggcaatccagattgtacaaggtgctattgttttgagtgcgtggactctctggtgggaccaggcaccagcggaaaggtgcacgccatgtccaactgggtgtgctacctgtgcctgccatcctctcgcagcggactgctgcagcggagaaggaagtggagatcccagctgaaggccttctatgatagggagtctgagaaccccctggagatgtttgagaccgtgccagtgtggcgccggcagcccgtgagggtgctgagcctgttcgaggatatcaagaaggagctgacatccctgggctttctggagtccggctctgaccccggacagctgaagcacgtggtggatgtgaccgacacagtgcggaaggatgtggaggagtggggccctttcgacctggtgtacggagcaacccctccactgggacacacatgcgacagacccccttcttggtacctgttccagtttcaccgcctgctgcagtatgcaaggccaaagccaggcagccctagaccattcttttggatgttcgtggataatctggtgctgaacaaggaggatctggacgtggccagcaggtttctggagatggagccagtgaccatcccagacgtgcacggcggctccctgcagaatgccgtgcgcgtgtggtctaacatccctgccatcagaagcaggcactgggcactggtgagcgaggaggagctgtccctgctggcccagaataagcagagcagcaagctggccgccaagtggcctacaaagctggtgaagaactgcttcctgccactgcgggagtacttcaagtatttttccaccgagctgacatctagcctgggaggaccctcctctggcgccccaccacctagcggcggctcccctgccggctctccaaccagcacagaggagggcaccagcgagtccgccacaccagagtctggacctggcaccagcacagagccatccgagggctctgccccaggctctcctgcaggcagccctacctccaccgaagagggcaccagcacagagccttctgagggcagcgccccaggcacctctacagagccaagcgagctcgagtcccggccaggggaacggcccttccagtgtcggatctgcatgagaaacttttcaagagtggatcatctccatcgacacctccggacccacactggagagaaaccctttcagtgcaggatatgtatgcggaatttttcccggagggaacatttgtccggacatctcaagacacataccgggggaggcggtagtcagaagcctttccaatgccggatttgcatgaggaacttctcccaaagttccagcctcgtccgccatcttcgcacacatacaggcgagaagccattccagtgtaggatctgcatgcgcaattttagccgcaaggagcgattggcaacccacctcaagacgcatacaggtagtcagaagccttttcagtgcaggatctgcatgaggaattttagtgtcgcacataacctcacaaggcatctgcgcacgcatactggagagaagccctttcagtgtaggatttgtatgcggaacttcagcattagtcataacctggcaaggcatctcaaaactcatttgcgcgggtctagccccaagaagaagagaaaggtgggagtcgacggatccagcggctccgagaccccaggcacatctgagagcgccacccctgagtcccggaccctggtgacattcaaggacgtgttcgtggacttcacccgggaggagtggaagctgctggacacagcccagcagatcgtgtacaggaacgtgatgctggagaactataagaatctggtgtctctgggctaccagctgacaaagccagatgtgatcctgcggctggagaagggagaggagccctggctggtgtagtctagaaatcaacctctggattacaaaatttgtgaaagattgactggtattcttaactatgttgctccttttacgctatgtggatacgctgctttaatgcctttgtatcatgctattgcttcccgtatggctttcattttctcctccttgtataaatcctggttgctgtctctttatgaggagttgtggcccgttgtcaggcaacgtggcgtggtgtgcactgtgtttgctgacgcaacccccactggttggggcattgccaccacctgtcagctcctttccgggactttcgctttccccctccctattgccacggcggaactcatcgccgcctgccttgcccgctgctggacaggggctcggctgttgggcactgacaattccgtggtgttgtcggggaaatcatcgtcctttccttggctgctcgcctgtgttgccacctggattctgcgcgggacgtccttctgctacgtcccttcggccctcaatccagcggaccttccttcccgcggcctgctgccggctctgcggcctcttccgcgtcttcgccttcgccctcagacgagtcggatctccctttgggccgcctccccgcctgttaattaaaaaaaaaaaaaaaaaaaaaaaaaaaaaaaaaaaaaaaaaaaaaaaaaaaactagtggcgcctgatgcggtattttctccttacgcatctgtgcggtatttcacaccgcataatccagcacagtggcggcccgtttaaacccgctgatcagcctcgactgtgccttctagttgccagccatctgttgtttgcccctcccccgtgccttccttgaccctggaaggtgccactcccactgtcctttcctaataaaatgaggaaattgcatcgcattgtctgagtaggtgtcattctattctggggggtggggtggggcaggacagcaagggggaggattgggaagacaatagcaggcatgctggggatgcggtgggctctatggcttctgaggcggaaagaaccagctgcattaatgaatcggccaacgcgcggggagaggcggtttgcgtattgggcgctcttccgcttcctcgctcactgactcgctgcgctcggtcgttcggctgcggcgagcggtatcagctcactcaaaggcggtaatacggttatccacagaatcaggggataacgcaggaaagaacatgtgagcaaaaggccagcaaaaggccaggaaccgtaaaaaggccgcgttgctggcgtttttccataggctccgcccccctgacgagcatcacaaaaatcgacgctcaagtcagaggtggcgaaacccgacaggactataaagataccaggcgtttccccctggaagctccctcgtgcgctctcctgttccgaccctgccgcttaccggatacctgtccgcctttctcccttcgggaagcgtggcgctttctcatagctcacgctgtaggtatctcagttcggtgtaggtcgttcgctccaagctgggctgtgtgcacgaaccccccgttcagcccgaccgctgcgccttatccggtaactatcgtcttgagtccaacccggtaagacacgacttatcgccactggcagcagccactggtaacaggattagcagagcgaggtatgtaggcggtgctacagagttcttgaagtggtggcctaactacggctacactagaagaacagtatttggtatctgcgctctgctgaagccagttaccttcggaaaaagagttggtagctcttgatccggcaaacaaaccaccgctggtagcggtttttttgtttgcaagcagcagattacgcgcagaaaaaaaggatctcaagaagatcctttgatcttttctacggggtctgacgctcagtggaacgaaaactcacgttaagggattttggtcatgagattatcaaaaaggatcttcacctagatccttttaaattaaaaatgaagttttaaatcaatctaaagtatatatgagtaaacttggtctgacagttaccaatgcttaatcagtgaggcacctatctcagcgatctgtctatttcgttcatccatagttgcctgactccccgtcgtgtagataactacgatacgggagggcttaccatctggccccagtgctgcaatgataccgcgagacccacgctcaccggctccagatttatcagcaataaaccagccagccggaagggccgagcgcagaagtggtcctgcaactttatccgcctccatccagtctattaattgttgccgggaagctagagtaagtagttcgccagttaatagtttgcgcaacgttgttgccattgctacaggcatcgtggtgtcacgctcgtcgtttggtatggcttcattcagctccggttcccaacgatcaaggcgagttacatgatcccccatgttgtgcaaaaaagcggttagctccttcggtcctccgatcgttgtcagaagtaagttggccgcagtgttatcactcatggttatggcagcactgcataattctcttactgtcatgccatccgtaagatgcttttctgtgactggtgagtactcaaccaagtcattctgagaatagtgtatgcggcgaccgagttgctcttgcccggcgtcaatacgggataataccgcgccacatagcagaactttaaaagtgctcatcattggaaaacgttcttcggggcgaaaactctcaaggatcttaccgctgttgagatccagttcgatgtaacccactcgtgcacccaactgatcttcagcatcttttactttcaccagcgtttctgggtgagcaaaaacaggaaggcaaaatgccgcaaaaaagggaataagggcgacacggaaatgttgaatactcatactcttcctttttcaatattattgaagcatttatcagggttattgtctcatgagcggatacatatttgaatgtatttagaaaaataaacaaataggggttccgcgcacatttccccgaaaagtgccacctga

SEQ ID NO: 1244 - DNA, 7171 bp, synthetic construct
  source 1..7171: mol_type = other DNA
cgtcgatcgacggatcgggagatctcccgatcccctatggtgcactctcagtacaatctgctctgatgccgcatagttaagccagtatctgctccctgcttgtgtgttggaggtcgctgagtagtgcgcgagcaaaatttaagctacaacaaggcaaggcttgaccgacaattgcatgaagaatctgcttagggttaggcgttttgcgctgcttcgcgatgtacgggccagatatacgcgttgacattgattattgactagttattaatagtaatcaattacggggtcattagttcatagcccatatatggagttccgcgttacataacttacggtaaatggcccgcctggctgaccgcccaacgacccccgcccattgacgtcaataatgacgtatgttcccatagtaacgccaatagggactttccattgacgtcaatgggtggagtatttacggtaaactgcccacttggcagtacatcaagtgtatcatatgccaagtacgccccctattgacgtcaatgacggtaaatggcccgcctggcattatgcccagtacatgaccttatgggactttcctacttggcagtacatctacgtattagtcatcgctattaccatggtgatgcggttttggcagtacatcaatgggcgtggatagcggtttgactcacggggatttccaagtctccaccccattgacgtcaatgggagtttgttttggcaccaaaatcaacgggactttccaaaatgtcgtaacaactccgccccattgacgcaaatgggcggtaggcgtgtacggtgggaggtctatataagcagagctctctggctaactagagaacccactgcttactggcttatcgaaattaatacgactcactataaggagacccaagctaccggtgccaccatgtacccatacgatgttccagattacgcttcgccgaagaaaaagcgcaaggtcaatcacgatcaggagttcgacccccctaaggtgtacccaccagtgcctgcagagaagaggaagccaatccgggtgctgagcctgtttgatggcatcgccaccggcctgctggtgctgaaggatctgggcatccaggtggaccggtacatcgcctccgaggtgtgcgaggattctatcaccgtgggcatggtgcgccaccagggcaagatcatgtatgtgggcgacgtgcggtccgtgacacagaagcacatccaggagtggggcccattcgatctggtgatcggcggcagcccctgtaatgacctgtccatcgtgaaccctgcaaggaagggactgtacgagggaaccggccggctgttctttgagttttatagactgctgcacgacgccaggcctaaggagggcgacgatagaccattcttttggctgttcgagaatgtggtggctatgggcgtgagcgataagagggacatctccaggtttctggagtctaaccccgtgatgatcgatgcaaaggaggtgtccgccgcacacagagccaggtatttctggggcaatctgccaggaatgaacaggccactggcaagcaccgtgaatgacaagctggagctgcaggagtgcctggagcacggaaggatcgccaagttttccaaggtgcgcacaatcaccacacggagcaattccatcaagcagggcaaggatcagcacttccccgtgttcatgaacgagaaggaggacatcctgtggtgtaccgagatggagagagtgttcggctttccagtgcactacacagacgtgtctaacatgagcaggctggcaaggcagcggctgctgggcagatcttggagcgtgcccgtgatcaggcacctgttcgcccctctgaaggagtattttgcctgcgtgagcagcggcaactccaatgccaacagccggggcccctctttcagctccggattggtgcctctgagcctgaggggctcccacatggcagcaatccccgccctggaccccgaggccgagcctagcatggacgtgatcctggtgggctctagcgagctgtcctctagcgtgtctccaggaaccggaagggatctgatcgcatacgaggtgaaggccaatcagcggaacatcgaggacatctgtatctgctgtggcagcctgcaggtgcacacacagcacccactgttcgagggaggaatctgcgcaccctgtaaggataagttcctggacgccctgtttctgtacgacgatgacggctaccagtcctattgctctatctgctgttccggcgagaccctgctgatctgcggcaatccagattgtacaaggtgctattgttttgagtgcgtggactctctggtgggaccaggcaccagcggaaaggtgcacgccatgtccaactgggtgtgctacctgtgcctgccatcctctcgcagcggactgctgcagcggagaaggaagtggagatcccagctgaaggccttctatgatagggagtctgagaaccccctggagatgtttgagaccgtgccagtgtggcgccggcagcccgtgagggtgctgagcctgttcgaggatatcaagaaggagctgacatccctgggctttctggagtccggctctgaccccggacagctgaagcacgtggtggatgtgaccgacacagtgcggaaggatgtggaggagtggggccctttcgacctggtgtacggagcaacccctccactgggacacacatgcgacagacccccttcttggtacctgttccagtttcaccgcctgctgcagtatgcaaggccaaagccaggcagccctagaccattcttttggatgttcgtggataatctggtgctgaacaaggaggatctggacgtggccagcaggtttctggagatggagccagtgaccatcccagacgtgcacggcggctccctgcagaatgccgtgcgcgtgtggtctaacatccctgccatcagaagcaggcactgggcactggtgagcgaggaggagctgtccctgctggcccagaataagcagagcagcaagctggccgccaagtggcctacaaagctggtgaagaactgcttcctgccactgcgggagtacttcaagtatttttccaccgagctgacatctagcctgggaggaccctcctctggcgccccaccacctagcggcggctcccctgccggctctccaaccagcacagaggagggcaccagcgagtccgccacaccagagtctggacctggcaccagcacagagccatccgagggctctgccccaggctctcctgcaggcagccctacctccaccgaagagggcaccagcacagagccttctgagggcagcgccccaggcacctctacagagccaagcgagctcgagtcccggccaggggaacggcccttccagtgtcggatctgcatgagaaacttttcacgcaagcaccaccttgggagacataccagaacccacactggagagaaaccctttcagtgcaggatatgtatgcggaatttttcccgacgggaacacctcacgattcatttgcggacacataccgggggaggcggtagtcagaagcctttccaatgccggatttgcatgaggaacttctcccagagctcatctctcgtgcggcacctgcggacacatacaggcgagaagccattccagtgtaggatctgcatgcgcaattttagccggaaggagcgattggcgacgcacctgaaaacgcatacaggtagtcagaagccttttcagtgcaggatctgcatgaggaattttagtgtagcccacaacctgactaggcatttgaggacgcatactggagagaagccctttcagtgtaggatttgtatgcggaacttcagcatttctcacaatctcgcgcgacatttgaaaactcatttgcgcgggtctagccccaagaagaagagaaaggtgggagtcgacggatccagcggctccgagaccccaggcacatctgagagcgccacccctgagtcccggaccctggtgacattcaaggacgtgttcgtggacttcacccgggaggagtggaagctgctggacacagcccagcagatcgtgtacaggaacgtgatgctggagaactataagaatctggtgtctctgggctaccagctgacaaagccagatgtgatcctgcggctggagaagggagaggagccctggctggtgtagtctagaaatcaacctctggattacaaaatttgtgaaagattgactggtattcttaactatgttgctccttttacgctatgtggatacgctgctttaatgcctttgtatcatgctattgcttcccgtatggctttcattttctcctccttgtataaatcctggttgctgtctctttatgaggagttgtggcccgttgtcaggcaacgtggcgtggtgtgcactgtgtttgctgacgcaacccccactggttggggcattgccaccacctgtcagctcctttccgggactttcgctttccccctccctattgccacggcggaactcatcgccgcctgccttgcccgctgctggacaggggctcggctgttgggcactgacaattccgtggtgttgtcggggaaatcatcgtcctttccttggctgctcgcctgtgttgccacctggattctgcgcgggacgtccttctgctacgtcccttcggccctcaatccagcggaccttccttcccgcggcctgctgccggctctgcggcctcttccgcgtcttcgccttcgccctcagacgagtcggatctccctttgggccgcctccccgcctgttaattaaaaaaaaaaaaaaaaaaaaaaaaaaaaaaaaaaaaaaaaaaaaaaaaaaaactagtggcgcctgatgcggtattttctccttacgcatctgtgcggtatttcacaccgcataatccagcacagtggcggcccgtttaaacccgctgatcagcctcgactgtgccttctagttgccagccatctgttgtttgcccctcccccgtgccttccttgaccctggaaggtgccactcccactgtcctttcctaataaaatgaggaaattgcatcgcattgtctgagtaggtgtcattctattctggggggtggggtggggcaggacagcaagggggaggattgggaagacaatagcaggcatgctggggatgcggtgggctctatggcttctgaggcggaaagaaccagctgcattaatgaatcggccaacgcgcggggagaggcggtttgcgtattgggcgctcttccgcttcctcgctcactgactcgctgcgctcggtcgttcggctgcggcgagcggtatcagctcactcaaaggcggtaatacggttatccacagaatcaggggataacgcaggaaagaacatgtgagcaaaaggccagcaaaaggccaggaaccgtaaaaaggccgcgttgctggcgtttttccataggctccgcccccctgacgagcatcacaaaaatcgacgctcaagtcagaggtggcgaaacccgacaggactataaagataccaggcgtttccccctggaagctccctcgtgcgctctcctgttccgaccctgccgcttaccggatacctgtccgcctttctcccttcgggaagcgtggcgctttctcatagctcacgctgtaggtatctcagttcggtgtaggtcgttcgctccaagctgggctgtgtgcacgaaccccccgttcagcccgaccgctgcgccttatccggtaactatcgtcttgagtccaacccggtaagacacgacttatcgccactggcagcagccactggtaacaggattagcagagcgaggtatgtaggcggtgctacagagttcttgaagtggtggcctaactacggctacactagaagaacagtatttggtatctgcgctctgctgaagccagttaccttcggaaaaagagttggtagctcttgatccggcaaacaaaccaccgctggtagcggtttttttgtttgcaagcagcagattacgcgcagaaaaaaaggatctcaagaagatcctttgatcttttctacggggtctgacgctcagtggaacgaaaactcacgttaagggattttggtcatgagattatcaaaaaggatcttcacctagatccttttaaattaaaaatgaagttttaaatcaatctaaagtatatatgagtaaacttggtctgacagttaccaatgcttaatcagtgaggcacctatctcagcgatctgtctatttcgttcatccatagttgcctgactccccgtcgtgtagataactacgatacgggagggcttaccatctggccccagtgctgcaatgataccgcgagacccacgctcaccggctccagatttatcagcaataaaccagccagccggaagggccgagcgcagaagtggtcctgcaactttatccgcctccatccagtctattaattgttgccgggaagctagagtaagtagttcgccagttaatagtttgcgcaacgttgttgccattgctacaggcatcgtggtgtcacgctcgtcgtttggtatggcttcattcagctccggttcccaacgatcaaggcgagttacatgatcccccatgttgtgcaaaaaagcggttagctccttcggtcctccgatcgttgtcagaagtaagttggccgcagtgttatcactcatggttatggcagcactgcataattctcttactgtcatgccatccgtaagatgcttttctgtgactggtgagtactcaaccaagtcattctgagaatagtgtatgcggcgaccgagttgctcttgcccggcgtcaatacgggataataccgcgccacatagcagaactttaaaagtgctcatcattggaaaacgttcttcggggcgaaaactctcaaggatcttaccgctgttgagatccagttcgatgtaacccactcgtgcacccaactgatcttcagcatcttttactttcaccagcgtttctgggtgagcaaaaacaggaaggcaaaatgccgcaaaaaagggaataagggcgacacggaaatgttgaatactcatactcttcctttttcaatattattgaagcatttatcagggttattgtctcatgagcggatacatatttgaatgtatttagaaaaataaacaaataggggttccgcgcacatttccccgaaaagtgccacctga

SEQ ID NO: 1245 - DNA, 7171 bp, synthetic construct
  source 1..7171: mol_type = other DNA
cgtcgatcgacggatcgggagatctcccgatcccctatggtgcactctcagtacaatctgctctgatgccgcatagttaagccagtatctgctccctgcttgtgtgttggaggtcgctgagtagtgcgcgagcaaaatttaagctacaacaaggcaaggcttgaccgacaattgcatgaagaatctgcttagggttaggcgttttgcgctgcttcgcgatgtacgggccagatatacgcgttgacattgattattgactagttattaatagtaatcaattacggggtcattagttcatagcccatatatggagttccgcgttacataacttacggtaaatggcccgcctggctgaccgcccaacgacccccgcccattgacgtcaataatgacgtatgttcccatagtaacgccaatagggactttccattgacgtcaatgggtggagtatttacggtaaactgcccacttggcagtacatcaagtgtatcatatgccaagtacgccccctattgacgtcaatgacggtaaatggcccgcctggcattatgcccagtacatgaccttatgggactttcctacttggcagtacatctacgtattagtcatcgctattaccatggtgatgcggttttggcagtacatcaatgggcgtggatagcggtttgactcacggggatttccaagtctccaccccattgacgtcaatgggagtttgttttggcaccaaaatcaacgggactttccaaaatgtcgtaacaactccgccccattgacgcaaatgggcggtaggcgtgtacggtgggaggtctatataagcagagctctctggctaactagagaacccactgcttactggcttatcgaaattaatacgactcactataaggagacccaagctaccggtgccaccatgtacccatacgatgttccagattacgcttcgccgaagaaaaagcgcaaggtcaatcacgatcaggagttcgacccccctaaggtgtacccaccagtgcctgcagagaagaggaagccaatccgggtgctgagcctgtttgatggcatcgccaccggcctgctggtgctgaaggatctgggcatccaggtggaccggtacatcgcctccgaggtgtgcgaggattctatcaccgtgggcatggtgcgccaccagggcaagatcatgtatgtgggcgacgtgcggtccgtgacacagaagcacatccaggagtggggcccattcgatctggtgatcggcggcagcccctgtaatgacctgtccatcgtgaaccctgcaaggaagggactgtacgagggaaccggccggctgttctttgagttttatagactgctgcacgacgccaggcctaaggagggcgacgatagaccattcttttggctgttcgagaatgtggtggctatgggcgtgagcgataagagggacatctccaggtttctggagtctaaccccgtgatgatcgatgcaaaggaggtgtccgccgcacacagagccaggtatttctggggcaatctgccaggaatgaacaggccactggcaagcaccgtgaatgacaagctggagctgcaggagtgcctggagcacggaaggatcgccaagttttccaaggtgcgcacaatcaccacacggagcaattccatcaagcagggcaaggatcagcacttccccgtgttcatgaacgagaaggaggacatcctgtggtgtaccgagatggagagagtgttcggctttccagtgcactacacagacgtgtctaacatgagcaggctggcaaggcagcggctgctgggcagatcttggagcgtgcccgtgatcaggcacctgttcgcccctctgaaggagtattttgcctgcgtgagcagcggcaactccaatgccaacagccggggcccctctttcagctccggattggtgcctctgagcctgaggggctcccacatggcagcaatccccgccctggaccccgaggccgagcctagcatggacgtgatcctggtgggctctagcgagctgtcctctagcgtgtctccaggaaccggaagggatctgatcgcatacgaggtgaaggccaatcagcggaacatcgaggacatctgtatctgctgtggcagcctgcaggtgcacacacagcacccactgttcgagggaggaatctgcgcaccctgtaaggataagttcctggacgccctgtttctgtacgacgatgacggctaccagtcctattgctctatctgctgttccggcgagaccctgctgatctgcggcaatccagattgtacaaggtgctattgttttgagtgcgtggactctctggtgggaccaggcaccagcggaaaggtgcacgccatgtccaactgggtgtgctacctgtgcctgccatcctctcgcagcggactgctgcagcggagaaggaagtggagatcccagctgaaggccttctatgatagggagtctgagaaccccctggagatgtttgagaccgtgccagtgtggcgccggcagcccgtgagggtgctgagcctgttcgaggatatcaagaaggagctgacatccctgggctttctggagtccggctctgaccccggacagctgaagcacgtggtggatgtgaccgacacagtgcggaaggatgtggaggagtggggccctttcgacctggtgtacggagcaacccctccactgggacacacatgcgacagacccccttcttggtacctgttccagtttcaccgcctgctgcagtatgcaaggccaaagccaggcagccctagaccattcttttggatgttcgtggataatctggtgctgaacaaggaggatctggacgtggccagcaggtttctggagatggagccagtgaccatcccagacgtgcacggcggctccctgcagaatgccgtgcgcgtgtggtctaacatccctgccatcagaagcaggcactgggcactggtgagcgaggaggagctgtccctgctggcccagaataagcagagcagcaagctggccgccaagtggcctacaaagctggtgaagaactgcttcctgccactgcgggagtacttcaagtatttttccaccgagctgacatctagcctgggaggaccctcctctggcgccccaccacctagcggcggctcccctgccggctctccaaccagcacagaggagggcaccagcgagtccgccacaccagagtctggacctggcaccagcacagagccatccgagggctctgccccaggctctcctgcaggcagccctacctccaccgaagagggcaccagcacagagccttctgagggcagcgccccaggcacctctacagagccaagcgagctcgagtcccggccaggggaacggcccttccagtgtcggatctgcatgagaaacttttcacgagtcgatcacctccaccgccacctgcgaacccacactggagagaaaccctttcagtgcaggatatgtatgcggaatttttccaggtccgaccacctcagcttgcacttgaagacacataccgggggaggcggtagtcagaagcctttccaatgccggatttgcatgaggaacttctcccaatctagttcattggtacgacatcttaggacacatacaggcgagaagccattccagtgtaggatctgcatgcgcaattttagccgaaaagagcggctggcgacccacttgaaaacgcatacaggtagtcagaagccttttcagtgcaggatctgcatgaggaattttagtgtagcgcataacttgacacggcacttgcgcacgcatactggagagaagccctttcagtgtaggatttgtatgcggaacttcagcatttcccataatctggcgcggcacctgaagactcatttgcgcgggtctagccccaagaagaagagaaaggtgggagtcgacggatccagcggctccgagaccccaggcacatctgagagcgccacccctgagtcccggaccctggtgacattcaaggacgtgttcgtggacttcacccgggaggagtggaagctgctggacacagcccagcagatcgtgtacaggaacgtgatgctggagaactataagaatctggtgtctctgggctaccagctgacaaagccagatgtgatcctgcggctggagaagggagaggagccctggctggtgtagtctagaaatcaacctctggattacaaaatttgtgaaagattgactggtattcttaactatgttgctccttttacgctatgtggatacgctgctttaatgcctttgtatcatgctattgcttcccgtatggctttcattttctcctccttgtataaatcctggttgctgtctctttatgaggagttgtggcccgttgtcaggcaacgtggcgtggtgtgcactgtgtttgctgacgcaacccccactggttggggcattgccaccacctgtcagctcctttccgggactttcgctttccccctccctattgccacggcggaactcatcgccgcctgccttgcccgctgctggacaggggctcggctgttgggcactgacaattccgtggtgttgtcggggaaatcatcgtcctttccttggctgctcgcctgtgttgccacctggattctgcgcgggacgtccttctgctacgtcccttcggccctcaatccagcggaccttccttcccgcggcctgctgccggctctgcggcctcttccgcgtcttcgccttcgccctcagacgagtcggatctccctttgggccgcctccccgcctgttaattaaaaaaaaaaaaaaaaaaaaaaaaaaaaaaaaaaaaaaaaaaaaaaaaaaaactagtggcgcctgatgcggtattttctccttacgcatctgtgcggtatttcacaccgcataatccagcacagtggcggcccgtttaaacccgctgatcagcctcgactgtgccttctagttgccagccatctgttgtttgcccctcccccgtgccttccttgaccctggaaggtgccactcccactgtcctttcctaataaaatgaggaaattgcatcgcattgtctgagtaggtgtcattctattctggggggtggggtggggcaggacagcaagggggaggattgggaagacaatagcaggcatgctggggatgcggtgggctctatggcttctgaggcggaaagaaccagctgcattaatgaatcggccaacgcgcggggagaggcggtttgcgtattgggcgctcttccgcttcctcgctcactgactcgctgcgctcggtcgttcggctgcggcgagcggtatcagctcactcaaaggcggtaatacggttatccacagaatcaggggataacgcaggaaagaacatgtgagcaaaaggccagcaaaaggccaggaaccgtaaaaaggccgcgttgctggcgtttttccataggctccgcccccctgacgagcatcacaaaaatcgacgctcaagtcagaggtggcgaaacccgacaggactataaagataccaggcgtttccccctggaagctccctcgtgcgctctcctgttccgaccctgccgcttaccggatacctgtccgcctttctcccttcgggaagcgtggcgctttctcatagctcacgctgtaggtatctcagttcggtgtaggtcgttcgctccaagctgggctgtgtgcacgaaccccccgttcagcccgaccgctgcgccttatccggtaactatcgtcttgagtccaacccggtaagacacgacttatcgccactggcagcagccactggtaacaggattagcagagcgaggtatgtaggcggtgctacagagttcttgaagtggtggcctaactacggctacactagaagaacagtatttggtatctgcgctctgctgaagccagttaccttcggaaaaagagttggtagctcttgatccggcaaacaaaccaccgctggtagcggtttttttgtttgcaagcagcagattacgcgcagaaaaaaaggatctcaagaagatcctttgatcttttctacggggtctgacgctcagtggaacgaaaactcacgttaagggattttggtcatgagattatcaaaaaggatcttcacctagatccttttaaattaaaaatgaagttttaaatcaatctaaagtatatatgagtaaacttggtctgacagttaccaatgcttaatcagtgaggcacctatctcagcgatctgtctatttcgttcatccatagttgcctgactccccgtcgtgtagataactacgatacgggagggcttaccatctggccccagtgctgcaatgataccgcgagacccacgctcaccggctccagatttatcagcaataaaccagccagccggaagggccgagcgcagaagtggtcctgcaactttatccgcctccatccagtctattaattgttgccgggaagctagagtaagtagttcgccagttaatagtttgcgcaacgttgttgccattgctacaggcatcgtggtgtcacgctcgtcgtttggtatggcttcattcagctccggttcccaacgatcaaggcgagttacatgatcccccatgttgtgcaaaaaagcggttagctccttcggtcctccgatcgttgtcagaagtaagttggccgcagtgttatcactcatggttatggcagcactgcataattctcttactgtcatgccatccgtaagatgcttttctgtgactggtgagtactcaaccaagtcattctgagaatagtgtatgcggcgaccgagttgctcttgcccggcgtcaatacgggataataccgcgccacatagcagaactttaaaagtgctcatcattggaaaacgttcttcggggcgaaaactctcaaggatcttaccgctgttgagatccagttcgatgtaacccactcgtgcacccaactgatcttcagcatcttttactttcaccagcgtttctgggtgagcaaaaacaggaaggcaaaatgccgcaaaaaagggaataagggcgacacggaaatgttgaatactcatactcttcctttttcaatattattgaagcatttatcagggttattgtctcatgagcggatacatatttgaatgtatttagaaaaataaacaaataggggttccgcgcacatttccccgaaaagtgccacctga

SEQ ID NO: 1246 - protein, 4 aa, synthetic construct
WRPW

SEQ ID NO: 1247 - protein, 30 aa, synthetic construct
  VARIANT 2..30: note = residues may be deleted
GGGGGGGGGGGGGGGGGGGGGGGGGGGGGG

SEQ ID NO: 1248 - protein, 52 aa, synthetic construct
  VARIANT 13..19: note = any amino acid
  VARIANT 21..22: note = TR, LR or LK
  VARIANT 41..47: note = any amino acid
  VARIANT 49..50: note = TR, LR or LK
PFQCRICMRNFSXXXXXXXHXXTHTGEKPFQCRICMRNFSXXXXXXXHXXTH

SEQ ID NO: 1249 - protein, 143 aa, synthetic construct
  VARIANT 13..19: note = any amino acid
  VARIANT 21..22: note = TR, LR or LK
  VARIANT 41..47: note = any amino acid
  VARIANT 49..50: note = TR, LR or LK
PFQCRICMRNFSXXXXXXXHXXTHTGEKPFQCRICMRNFSXXXXXXXHXXTHLRGSPKKKRKVSGSETPGTSESATPESTGRTLVTFKDVFVDFTREEWKLLDTAQQIVYRNVMLENYKNLVSLGYQLTKPDVILRLEKGEEP

SEQ ID NO: 1250 - protein, 51 aa, synthetic construct
  VARIANT 12..18: note = any amino acid
  VARIANT 20..21: note = TR, LR or LK
  VARIANT 40..46: note = any amino acid
  VARIANT 48..49: note = TR, LR or LK
FQCRICMRNFSXXXXXXXHXXTHTGEKPFQCRICMRNFSXXXXXXXHXXTH

SEQ ID NO: 1251 - protein, 56 aa, synthetic construct
  VARIANT 13..19: note = any amino acid
  VARIANT 21..22: note = TR, LR or LK
  VARIANT 41..47: note = any amino acid
  VARIANT 49..50: note = TR, LR or LK
PFQCRICMRNFSXXXXXXXHXXTHTGEKPFQCRICMRNFSXXXXXXXHXXTHLRGS
